United States Patent Application Publication US 2026/0271966 A1 - sequence listing, part 8

SEQ ID NO: 42 - DNA, 3968902 bp, Bacillus amyloliquefaciens (residues 1,984,452-3,968,902 of 3,968,902)
  source 1..3968902: mol_type = genomic DNA; strain = Strain 071 ELA202071 ATCC PTA 1267064
ttcgatcattaatccgagcgcaatccctaaatagcccatacttgtcagccaggataatatttcactaataaaattgcccacactgttcacaacctctttatctttttacccaattatatgactgattgacaagcaaaatggttacaaattattttttaacgcacgatttttcagattctctttttaacacctcttctaaataagctaaaagtttcggtctcatttcttcccgcagaagcccgatctccgtgccggccttaaaacagccgaacttatctcctatatcaaaccggcttccttcaagctcccgcgcgtaaatgcttcgggtgcggcacacttcgcgcagcgcgtctgtcaattggatttcattgcccgcgcctcttccgatcgtcttcagcgttttaaaaatagcaggggttaatatgtagcggcccatcacggcaatatgagagggcgccttttcaacagccggcttctcaatcagatcctcaacctggtacacatgaccgctctgccgccccgtctgtataataccatatttgctgacatcagcaggatcgacgggctgtacgccgaccgtttctgtgccgtgttggttatagacgtctatgagctgtgaaagagcgggagtgtcagataccataatatcatcacctaagagaacggcaaaaggctcatctccgataaaatgctccgcacacagcaccgcatgtcctaatccgagcggttctttctgacggatgtaatgaatattggccaaatcggcaatccgttgcatttccttcagcatctctgtcttgcctttttcctcaagattgaattccaactccgccgaccggtcaaaatgatcttcaatcgagcgtttgtttctccctgtaataatcaatatatcttcaattcctgatgctgcggcctcttcgacaatatattggatggccggtttgtcgacaatcggcagcatttctttcggctgcgcctttgtcgccggcagaaatctcgttcctaaacctgctgcgggaatgaccgcttttctcactttttttctcattcatcttcactcctgatcctgtatgtttttcagcgaatctccaaatacccagattcggtttccgataaaattcatcatcattccgccgatagtggcggcgaacttactcaccaatagcgaacagccgcctttttgaaacacgtaaagcagcaaaaaggtgattcccgacgcagcaagattaatcatgagaaatcgcatgatctctttcccgtcagccttgcgttttacacgaaacgtccacttccggttccatacatagctgttgatgatccctgccgaataggagcagatctgcgccggaagataggggacatgacaagcggcgagaagaaagaagacaccaaaatcgatcagcgtattgccgacgcctacagtgcaaaaacggcctgctgtctttactttttctttcagcataacggtgacctcccctcataataagatgcggttcgctgtcctatttgttgatatggattactttagcggacagtgttgaataaacaattactaaaatatgaacaaaacatgaaaacgtaatgagactttgcaaaacttattaagttaacagtttgatagtttaggttgacatattccgcgaagggcactaatattctgtataagtgttaaccttaaatttattttggttaacattaattttcaaagtaagagaaaggaggggaatatatgcgggaagaaacctattacagcgtcagaatgagagcttcccgaaacgccccccatgagcagggcggaaaacacatttccggcggagaacggctcatcacttacagcggtttacaggaagcggtagatggcttattacataaaggcttctcgcactcaagagggatacctgattttatgcagattcagcttgaaagtattaatgaaccgatcgaaacgatccgccctttgccggttgctttccatcaaacagacacgccggaaaaaggacaagcaatcgcccgcaagcttctgcaaaaggcggggattcccccgcacatgatagagaaagcgtacgaaaacattgcggaatatgcagaagcaagaggagcggtcctgtttgatatccgggcaggaaaacgcattgacggcagaggaaatagaggtgtgcgggtatcacgagtggattggccgtcacatgattttcaaaaatggacttttacgcacaacatgccggaaaattcacgaataaaagaagcacatgccatcgcggcaaaagtttgcgcacatccggggattattgccgaattgtgctggtcagatgaccctgattacataacaggctacgttgccgcaaagaagctgggatatcagcggattgccaagatgaagaatgccggagatgaaagcggctgccggattttctttacagaaggctcaatagatacagagagctgtatccattttttagagaagcagcctgtattcattcagcgggaggagaacatatgaaacaatcaatgattgaaaaaagcaaacagcatctttggctgcccttcacacaaatgaaagattacgatgaagatccgttaatcattgaaagcggaaacgggatcatgctgaaagatatcagcggcaaagaatattatgacggcttttcttcagtatggcttaatgtacacggccaccgcaaaaaagaaatggatgaagcgattcaaaaacagcttgaaaaaatcgctcattcgactttgctgggtatgacgaacgttcccgcaacagaacttgccgagatgctgacaggcatcacaccggaaaagctgacacgcgttttttattccgacagcggagcggaagcaatggaaatcgctctgaaaatggcctttcaatactggaaaaacatagggagacccgagaaacagacgtttatttctatgcagaacggctatcacggcgatacgatcggagccgtcagcgtcggctccattgaactcttccaccatgtgtacggcccgctgatgtttgaaagctacaaagccccgattccgtatgtatacagatctgaaagcggcgaccccgtacagtgccgggatgaatgccttcacgcgctcgaacagctgcttgcaaagcatcacgaagagattgccgcacttacgattgaatcgatggtgcaaggcgcatcagggatgatcgtcatgcctgaaggctttctggcaggcgtacgaaagctgtgtacggcatatgatgtgttaatgatcgttgacgaagtggcgacggggttcggccgcaccggaaaaatgtttgcctgtgagcatgaaaatgtccagccggacttgatggcggcagggaaaggcattacgggaggctatttgccgatcgctgtgacgtttgccacagaagccatttatgaagccttctacgatgactacgacaaaatgaaaacatttttccacggccattcctatacaggaaatcagcttggctgtgccgcggcaattgaaaatctgcgtttattcgaatcagagtgcatcgttgaacaagtcgccgaaaaatcaaaaacggcagcggaatttcttcatgatctgaagcagctccctcatgtcggcgatgtccgccagctcggtttcatgtgcggcatagagcttgtgcaggataaggggacaaaacagccttatccgcctgagaagcggatgggatacaaggtgtccttgaaaatgagagagcttggtatgctgacacggccgctcggagacgtcatcgcctttctgccgccgcttgccagcacaaccgatcagttacaagccatgatctccattatgaaagaagcgatagccgaggtgaccggccgtggattttgacggatggctcctcggaaggctcgatgcggtgaaaagagacgggctgtatcggatgctgcgaacacaggaaaccgctcttaaaaccaaggggcaaaagcggcagacctgggcatccaatgactatttaggcctgtcaaaagatgaacggctgatcacagccgcgcaaacagcgctgagccggttcggagcgggaagcggcggctcacggttaacgacaggaaatactgtgtggcacgaaaaacttgaacaaacaatcgcggactttaaacagacggaagcggctttattattttcaagcggttacttggcgaatatcggcgtgcttgcctcactgcctcaaaaaggcgatgtcattttaagcgatcaactgaaccatgcgagcattgttgacggctgccgtttatcaaaagcggaaaccatcgtgtaccgccatattgatatggatgatcttgagaaaaaactcgcctccgtccagactcggaaacgccgctttatcgtcacggacggggtcttcagcatggacggcaccatcgcgcctcttgaccgcataatggcgcttgcaaagcagtaccaggcatttgtgatagcagatgacgcgcatgcaaccggtgtactcggggaaaacggcggaggaaccagtgactatttcggtgtttgtcctgatgttgtcatcggcacattaagcaaagcggtcggaacggaaggcggttttgccgcgggatcaaacattttcattgattttttgctgaatcaggcgcggacgtttatttttcagacggccctcccgccgtcaatttgtgcggcttcgcatacggcatttgacatcatttcagatatgcacgataagcgccgggagctgcagtcgtctgtcaaaaagataaaaacgcgtctggccgatatgggctttaccgtaagaggcggagatacaccgattatccccgttatcatcggtgatgcaaaaacagcggtttcagccgctgcactgctggagaaaaagggaatctgcgccccggccatccgcccgcccgccgttccggaaggcgaaagcagaatcaggctgaccgttacggcggatcgcagcttacaggatatagacgagctgacagaagcatttgattccattagaaaagagctgaatataaacaaatgagaagtttttttgtcacaggaacagataccggcgtcggaaaaaccatcgtttcttgcggtcttgccgcggcattccggcagaaacaggcggatatcggagtgtttaagccgtttttaagcggtgtgccgcggactcatccggaaagtgacacctcgctcttgaaagacatgtcacaaaccgcactgtctcatgaagaaatcacgccatttgaatggaaagagccgcttgcgccgtacacggccgccatgcttgaggggaaatccgtgagcatggcggatgtcatggcccactggagtaagatcaaaaatcgtcatgagtgtttcatcgttgagggggcaggcggcatttccgtcccgcttggtgaaaattacttagtcagtgatctgataaaagccatggaattgccggcggtgattgtcaccaggcctgatctcggaaccatcaaccacacatatttaaccgttgaatatgcgaaaaacatggggatagaggttctcggcattattatcaacggcgtaaggagcaggccggggctggacgaaaagacaaacccgagcatgattgaaatattatgcaaagttccgattttgggaatcacaccgaagctggatcacgtttcatcggaaaacattcaacacatgattgagaaacatatagatgtttcctctttcatgaatctgacacaaatggggagataaacatgaatcaatggatggatcttgcagagagagtgctggacggggcggaagtaacgaatcaagaagcgctggccattttaaattgtcctgatgaggatcttttattgctgatgcatgccgcttttcatatcagaaaacgattttacggaaaaaaagtaaagctgaatatgattatgaatgccaaatcaggcctgtgtccggaaaattgcgggtactgttcacaatcttcaatatcaaaagcgccgattgagtcttaccggatggtggataagcatatattgctaaagggggcaaaacgcgcccacgacctgaatatagggacatactgtatcgtcgccagcgggcggggaccgtcaaacagagaagtagatcaagttgttgatgctgtcaaagaaattaaagaaacgtacggtttaaaaatctgcgcatgtctcggtctgctgaagccggaacaggcagagcggctgaaacaggcaggagtagaccggtacaatcataacatcaatacatcacagaggaatcactcaaacattacgacctcccacacgtatgacgacagggtcaatacagtggaaacggcgaaacaatcggggatgtcaccttgttctggtgtcatcgtcggcatgaaagagacgaaacaggacgtcattgatatggcgaacagcttaaaagcgcttgacgccgacagcatcccggttaattttctgcatgcgattgacggaactccgttagaaggggtaagcgaattacatccggtgtattgcctgaaagtgctcgccttgttccgttttatcaatccgtcaaaagaaatccgtatctcaggaggccgggaagtcaaccttcgttcgctacagccgctgggactttacgccgcaaattcgattttcgtcggagattacttaacgacagcagggcagcaagaaacagaggatcatcaaatgctccatgatttaggttttgaagtcgaatccgttgaagaaatgaaagccggcctgcaatccgcctgcaatacggaggtataagatgacggcggacctatcgattgcacatccgtctctccatgcggattcggatttttggaatgacccttacccgttttatgacaaactgcgatccattgatcctgtttataaaggaaccgtattaaaatatccgggctggtatgtcaccgggtacaaagaagcggcagcgattttgaaagacattcggtttaaaaaccgcattcctcttccggaagcttcaacgaaatatcaaaatctatcgcatatccagcacgatatgctgttatttaaaaatcaatcagaccataagcggatgcggatgcttatcggtaaagaatttaccgcaaagacggcggaatcacttcgcccttgtataaaagaaacggttcatgacttgttggatcaagtccaaatcaaaaaaaccgcggaccttgtttcagagtttgcctttccattggcaagccttatcattgcggagatactcggagtgccgaaagaggagagatatcaattcagacaatggacggcagacgtcatccaggccattgatcttacccgatcaagaaagacgttagtcagagcaagcgacaccgcaggcaggctgacgtcatatttcaaagatttgattcacaagcggaaagcgcaccctcagcaagacttgatcagcaggtttattatggaggaacagctttcaaaagaggaagtgctcgcgacatgtatcttacttgtcatagccggacacgagacgacggtaaacctcataagcaacggtgtgtttactttattgaaacaccctgaacagcttagcgcactgagagaaaacccctcgcttattgaaactgcagttgaggaatgtctgcgctacgacagccccgcgcagctgacggcacgcaccgcctcagaagactgcgaaataaatgggaagaccataaaaaaaggagagcaggtatatatccttttaggggcagccaatcgcgatccaagcatattcgatcaacctcacaaaatggatatccaaagaaagccgaacccgcatcttgcattcggaaagaacgcccatttttgcataggctcctcattagcgcgcatcgaagcacaaattgcaattcttacactgtttgagcggatgcctaagcttcggctggctgcacaccgccttgaataccgcaagctcattggttttaggtcgctcaaagagctcccggttgtcattggctgaatgaccatgcaggagggccggattttatcggttcctcttgcaggaaataaatgaaagaaaaaagaatacatatttataaagcaaaaatcctctctgatccatctcactatccctaaaaaaactcactgctcagccaatcaatctaatacagcaagagtctccctttctttcgccaaaacggaacattcaccatgatgcacattttttcagcctcagaaacggtgcaaaaccggcatgttttttgctttattttctcgatttttttgtaagcgcttactaatattaagcagaaaagagggggatttgtggacattgttattattttattggcattaggcatgctgatgtttgcggcttaccggggcttttcagtcattttattcgccccgatttgtgcgctgtttgccgtgctcctgacagatccaagcttcgtacttcctttcttctcgaatatatttatggagaagatggtaggatttattaagctgtattttcccgtatttcttttaggggccgtttttggcaaggttgttgaaatatccgggctcgctgagtcgattgcaaaaacaatcgtcagacttgtgggagcaaaaagagccattctcgccatcgtcttaatgggtgcgattttaacgtacagcggcgtcagtctcttcgtagcggtgtttgccatttatccgtttgctaaaaacctatttattaaagctgatattcccaagcgtctgatacccggtacgattgcattgggcgcctttacatttacaatggatgcgcttcccggcacaccgcaaattcaaaatgtcattccgaccgctttttttaaaacaaacatttatgccgctccctggctcggactgattggtgcagcatttgtgcttacggccggaatgatttatttagaatcccggcgcaaaaaagcggccaatgccggagaaggctatgctggatttcaatctgaagtttccgctgcagaggaatcctcaggtctggctaatgaaacacatacgcctgttttaccgcaggaggcagaacccagccccgcgcggcaagtgctcgcctttgttccgcttatccttgtgggagtcatgaacaaatgcttcacgatgtggctcccgcattggtaccctgacggatttgattttgcgccgctcggcttagaagcgttcgggaagattgacctttcctccgtcacggcgatctggtcagtagaactcgcactgttcatcggaatcatgaccacgattttgttcgattggaaaaaagtcctcttcaatttgaaagaaggactgaatgagggcatcgggggtgccttgctggcgtcgatgaatacaggagccgaatacggatttggcggcatcattgcggcgcttcccggctttaaaatggtcagcagcggcatatcgcagacgtttacagatccgctcgtcaacggagcggtgacgaccactgcgcttgccgggattacaggatcggcatcaggaggaatgggcatcgctttaagcacgatgtcagcagcgtatacagaagcaatcaatacattccacatcccgccggaggtcatgcaccgggtgatctcgatggcctccggcgggatggacactcttccgcataatggcgccgtcattacgctgctcgcggtcaccgggttgacccaccgccaatcctacagggatatctttgccattaccgtcattaaaacagccgctgtgtttgtcatcatcgccatttacagtctgacgggccttgtgtagccaaaatagaaaggggaaacgaatatgggaaaaggaaaagtgatggactcttatcaagatgctgctgcactgatcaaggacggagacaccctcatcgcaggaggcttcggcctgtgcggcattccggaacaattaattctcgcgatcagggacagcggcgtaaaaaacttgaccgttgtcagtaataactgcggtgttgatgattgggggttaggcctcttgcttgcaaaccggcagatcaaaaaaatggtcgcatcctatgtgggagaaaacaaaacctttgaacggcagtttttaagcggagagctggaagtcgaattggtgccccaaggaacgctcgcagaaagaattcgcgcgggaggggcgggcattccggcgttttacacacctgcgggcgtcggaacatcagtagccgagggaaaagaacataagacatttgacggacgcacctatcttctggagaaagggattacagggaacgccgccatcgtaaaggcctggaaagccgatcctctgggcaacctgatgttcagaaagacggcgagaaatttcaatccgctcgctgcaatggcaggcaaagtgacgattgcagaggctgaagaaatcgtcgatgccggagagcttgatccggatcaaattcatacgccgggtatttttgtgcagcacgtgctgctcggcgggattcatgaaaaacggattgaacgccgcaccgtccggcaagcatgataaaggaggctgacagaatgagagatagcagaaaacgaatgatcaaacgggctgtaaaggaaattaaggacggaatgaatgtgaacttggggatagggatgccgacgcttgtagccaatgagataccgaatgattataacgtcctgcttcagtctgaaaacggcttgctcgggatcgggccttatccggcggaaggaacggaggaccccgatctgatcaacgcgggaaaagaaaccatcaccgaagtaaagggagcctcgtattttgacagtgccgaatcctttgccatgattcgcggcggccacattgatgtagcgatcctcggcgggatggaagtgtccgaacggggagatttggcgaactggatgatcccaggaaaaatgatcaaaggaatgggcggcgccatggacttggtccacggagcaaaacggattattgtcattatggagcacgttaataaatatggggaatctaaagtgagaacggaatgtacgctgcctttaaccggcaggcaggtggtcgatcggctgatcacagatttggctgtattcgattttcatgatggccgtatgacgctcaccgaactgcaggaaggtgtaacaatggaggaggtctttgagaaaacagaaggtcattttactgtcagccagtcgttaaaaaacggggtcagaccaaaatgaggaggtgccgtcatgcattcattgcttattgaaaaaacagccgttgtaacaggagcagccggaggaatcgggcttgaaatcgcaaaagaattcgcccgtgaaggagcagccgtcatcatctctgatgtaaacgaacaagcggggaaagaagcggcggcaagactgaaagatgaaggctgtgaagcagtcagcatcacatgcgatgtaacaaatgaaaagcaagtggccgatatgctgcagacggtcgagaaacaattcggacgtctcgatatccttgtgaataatgcgggcattcagcatgtcgcgcccatcgaggaatttcccaccgaacagtttgaacggctcattcgtctcatgctgactgcgccatttatcgcaatgaagcatgcatttcccattatgaaaaaacagcaattcggtcgaatcattaatatggcgtctgtcaacggactgatcggttttcacgggaaagcggcatataacagcgccaagcacggcgtcatcggtttaacgaaagtcggcgcacttgaaggcgcggctgacggcattaccgtcaatgcgctttgtccgggatatgtggacactcagcttgtccgcaatcagttaaaggacatttccgcaacaaggaatgtaccgtacgagcgggtgcttgaggacgtcatctttccgctcgttccccaaaaacggctgctgtcagtgaaggaaatcgctgattacgccgtatttttggccagcgacaaagcaaaaggggtcacaggtcaggccgtagtcatggatggcgggtataccgctcaatagttcttatactttttaaaaaagcagccgctctgaacggctgtttttttatgcctgaaaaccttgttcactcaataggccgatttactgcgtcaatcggtatccgggcagggtcattcgcatgttctgcggcgtatttcgtccttgcggattttccccatccagatccatctcttgcgccacatttataaacaagcgcaatcagtttacaatccttcacagatatacaaatgattttttacaataaacagaaaatatgtaatttctgacacaataatgccaatagccctaaaacatatgaaacatgaagagcgcgtcctaagtgaagaagagccggtaacaggctccaccccggctttcatcatctctctttaagactgattttcggtgaaacccccatgttttattttatgaataaatatatctaattcgtttgtgaaaacgaacaataactcctccgaaagtattctatacacatttgttataatcatgctaggatgttagataaagggatattttgtaggatattgtatcccctgttcaatatgatcggaggaatctcatgaacaatcttgcctttttatttcctggacaagggtctcaatttgtaggaatgggcaaacaattttggaatgattttgtgctcgcaaagagattgtttgaagaagcgagcgatgcgatctccttggatgtaaaaaaactgtgttttaacggagatatgaatgaattgacaaagacaatgaacgcgcagcccgctattttaacggtcagtgtgattgcttttcaagtgtatatgcaggaaataggggtgaagccccgcttcctggcaggccatagcttaggcgaatattcagcgcttgtctgtgccggcgccctttcttttcaggatgccgttacacttgtaagggagcggggaattcttatgcaaaatgcggatccccatcagcaggggacgatggccgccgtgacacagctctctctccaaaccttgcaggaaatatgttcgaaagtatcgacggaagactttccggcaggtgtagcctgcatgaattcagaacagcagcatgtgatttccggacaccggcaagctgtggaacgtgtcatcaagatggcggaggaaaagggtgcggcatacacttatttgaatgtcagtgcgccttttcacagttcgatgatacgatcagcctccgaacaattccagactgtattacaccggtattccttccgggatgccgcatggccgatcatttcaaatgtcaccgcgcgcccttacagcagcggaaattcgatcagcgaacatctcaagcagcacatgacgatgccggttagatggacagaatcgatgcattacttgcttttacatggagtcacagaagtcatcgaaatgggtccgaacaatgtcttagccggtctgctgagaaaaacaacgaatcacattgtaccttatcccttaggacagacatctgatgttcccccgctttccaattcaacggaaagaaagaaacatattgtccatttacgcaaaaaacaactgaataaattgatgattcaatccgtcattgcgcgaaattacaacaaggattcagcggcttattccaatatgacgacgccattatttacgcaaatccaagagctgaaagagagaatgaaaaggcatgaagacgtgctttcagaacaagaactcgaacattcgatccatttatgcaaattaatttgtgaagctaaacagcttccggcttgggaagaattgcggattttaaaataaagcgcccaggaggggacctatgtataccagtcaattccaaaccttagtagatgtcattcgggaaagaagcagtatctctgatcgcgggatccgttttatcgaatccgataaaaacgagacggttgtctcttaccgccaattgtttgaagaggcgcaagggtatcttggctatttacagcatctcggcattaagccgaagcaggaaattgtatttcaaatccaagaaaacaaatcatttgtcgttgctttttgggcttgtatattaggaggaatgatcccggttccggtcagtatcggagaagatgatgaccataaactgaaggtctggcgcatttggaatatattaaatcatccctttctgattgcctctgaaaaagtattggacaaaataaagaaatacgctgcagaacacgatttacaggatttccatcatcaattaaacgaaaaatctgacatcattcaagatcaaacctacgattaccccgcttcattttatgaacctgatgcggatgaactcgcctttatccaattttcttccggatcgacaggagacccaaaaggagtcatgttaacgcatcacaacttaatacataacacgtgcgccattgggactgccctacacgttcattcgaaagactctttcttatcatggatgcctttaacgcatgatatggggctcatcgcctgccaccttgttcccttcataaccggaatcaatcaaaatctaatgcctacagagttatttattcgcagacctattctttggatgaaaaaagctcatgaacataaagccagtattctatcatctcctaatttcgggtacaactacttccttaaatttctgaaaaacgaaccagactgggatttatcccacatcaaggtcatcgcaaacggtgcagaaccgatattgccggagctgtgtgacgaatttttgaaaagatgcgcagcattcaatctgaaaagatccgccattttgaatgtttacggtttagcggaagcttcggttggcgcagcgttctctaaaataggtaaagaattcgttcccgtttatttgcatcgtgactatttaaatcttggtgaaagagctgtaaaagtcagcaaagaggaccaaaattgcgcttcattcgttgaggtgggacaacctattgactattgtcagcttcggatctccgatgaaacaaatgaaagagtagaagacggaatcatcggccatatccacatcaaaggagacaatgtgacgcaagggtattataacaacccagagagtacggaaaaagcgctgacttctgacggctgggtaaaaacgggagacctcggatttattagtgaaagtggtaacttagtcgtaaccggaagagaaaaggacattattttcgtgaacggaaaaaatatctacccgcacgatattgaacgggtcgcgattgaaatggaagaggttgacttaggaagggttgccgcctgcggtgtatatgatcaaaagacacaaagcggagaaatcgtgctctttgttgtttacaaaaaatcacctgaaaaattcgcaccgcttgtcaaagagataaaaaagcatttgtacaagcggggcggctggagcataaaagaagtccttccgatccgaaaactccctaaaacaaccagcggaaaggttaaacgctacgaacttgccagacagtatgaggcagggaatttttcaacagagtctgccgccatcaatgaatgtttggagagcagcccggaaacatccggacagacacccattcatgagatagaaacggaattgctgtctatcttttccgaagtgctcgatggaaaaaaggttcacctcgctgacagttattttgatatgggagcaaattcattacagttatcgcagattgccgagcgcatagaacagaaattcggacgcgagcttgccgtttcagatctctttacgtatccttctatcactgatttagcggcatatctgtctgaaagccgggctgaaatcaaacaggacgcggcagcgaaaccaagccatgtgacaccgaaagatatcgccattatcgggatgtcgctcaatgtcccgggagcgtcaacgaaaagtgatttttggaatctgcttgaaaaaggtgagcacagcattcgagaataccccgaatcccggctgaaagatgcggcggattatttaaagtccatccaaagcgagttcaatgagaatcagtttgtgaagggcggctatttagatgaaatcgaccgctttgattactcgttcttcggtttagctcctaaaacggctcagtttatggaccctaaccaaagactgtttttgcagtctgcatggcatgcgattgaagatgcgggctatgccggcggcagcatgaacgggagccgtgtcggggtatatgcagggtactcgaaggtgggctacgattatgaacgtctcctttctgcgaattatccggaggaacttcatcaatatatcgtgggcaatcttccttccgtgttagccagccgaatcgcttatttcttaaatttaaaagggccggcggtcacagtggatacggcatgctcctcatcgcttgccgccgttcatatggcatgtaaatctttaacgtccggcgattgtgaaatggctcttgcaggcggtatccggacatcgctcttgccgatctgtatcgggcttgatatggaatcttcggacggatacaccaaaacgttcagcaaagattcagacggcacgggcacaggtgaaggcgcggccgcagtcctgctaaaacctttgcaggatgctgttcgcgacggagaccatatttacggcgtaatcaagggaagcgcgatgaatcaagacggaacaaccgccgggattacagcaccgaatccggcagctcagactgaggtcattgagacggcttggaaagacgcgggcattgcccctgaaacactgtctttcatcgaagcgcatggcaccggaacgaagctcggcgatccggttgaatttaacgggctttgtaaagcgtttgaaaagtacacggcaaaaaaacaattttgtgcgattggttctgttaaatcgaacatcggtcatttgtttgaagcggcaggcatcgtcgggctgatcaaatctgtcctcatgctgaatcacaagaaaaatccgccgttagctcactttaatgaacctaatccgctcattcattttcactcatcaccattttatgtgaatcaggaagctgcagcgttcacatccggtgatgagccgctgcgaggcggaatcagctcgttcggttttagcggaacgaacgctcatgtggtattggaagaatatatttctcaaagtgagtatgcacccgaggatgaacatgggccgcacctatttgttttatccgctcatactgaaaaatcactctatgaactcgcacagcagtaccggcaatatgtatcggatgacagccaagcttcattaaagtccatttgctatacagcaagtacgggcagggctcatttggatcatggcattgccatgattgtatccggtaaacaagaactatcggataagctgacccgcctgattcagggagacagaaaccttcccggtgtatacatcggttacaagaatatgaaggaaatgctgcctgctcataaagaagagctgaatcaacaagcagccgctctgattaagcagcgtttacgtacgcaagatgaacggatcacatggctgaatcgcgcagccgaattatttgtgcaaggagccgttatcgattggcgcgcgctttattccggtgaaactgtacaaaagacgccattgccactgtatccgtttgaacggagccgatgctgggctgaagctgaccaattgcgcttaaacgaggacgaaaagagaggagaagcggcattgaatatcaaccaatcgaaggcgcacattgaatccttcctgaaaactgtaatcagcaatgcttcggggatcagagcggaggaactcgatctgaatgctcattttatcgggctcggaatggattctatcatgctgtcacaggtcaaaaaagccatcgcggacgaatttggggcagacatcccgatggatcgtttttttgatacgatgaacaaccttcaaagtgtcatagattacttggctgagaccgttccatcgtcctttgcatccgctccccctcaagagaatgttccggcgcaggaaatacaggtcatttcagaagcgcagtctgaatcggatcgcagagaaggtcatcaagagcatatgctcgaaaaaataatctcttctcagaatcaattaattcaggataccttgcaagctcaattaaatagctttaatttgttgagaaacagcgggcatcattccgatgagaaagaatacgctaaggcgcaagagaaatcaattccttctgtcaagcaggggcctccggccgtcactgcagaaaagaaagcggctcaagaagcgaaaccctatgttcctttccagcctcagaacctgcatgatcagggacactataccgcacggcaaaaacaatacttagaagacttcatcaagaaatacgcagataaaacgaaaggttccaaacaatatacggacaatacccgatttgctcatgcaaacaaccgcaatttgtccagcttccgttcgtattggaaggaaatcgtatacccaattatcgccgaacgttctgacggttctaaaatgtgggatattgacggaaatgaatatatcgatatcaccatgggattcggggttaaccttttcgggcatcatccttcctttattacacaggttatcgatgattcaacccgttcatcattgcctccgctcggcccgatgtcagatgtcgccggtgaagttgccgaccggatccgcacatgtaccggagtggaaagggtcgctttctataattcaggaacagaggccgtcatggttgccctgcgtttggcgcgggcggcaacaggaagaaagaaagtcgtggcgttctccggatcttatcacggcacgtttgacggcgtattaggggttgccggcacaaaaggcggggctgcgtctgcgaatccgctggctccgggcatactgcagagctttatggatgatttgattattttacattacaacaatcccgattcgctggacgtgatccgcagtcttggtgatgaattggcagccgtactggtggaaccggtacaaagccgcagaccggatttgcagccgcaggcatttttgaaagaattgcgggcgatcacgcagcaatccggaacagctctgattatggatgaaattattaccggatttcggatcggtcttggcggcgcacaggaatggttcggcattcaggctgatttagtgacctacggaaaaatcatcggcggcggacagccgttaggggtagttgccggaaaagctgagttcatgaatgcgatcgacgggggtacctggcagtatggggacgattcctacccgcaagacgaggcgaaacgcacgtttgtggccggcaccttcaatactcacccgcttaccatgaggatgtcattagccgtccttcgccatttacaaaccgaaggagaacatctgtatgagcagcttaatcaaaaaacagcctacctggtcgatgagctgaatcgctgcttcgaacaagcgcaagtgcctatccgcatggttcgattcggttctttattccggtttgtctcatcgctagataatgacttgttcttttaccatctcaactataaaggggtctatgtgtgggaaggacgcaactgcttcttgtctgtggcgcataccgcggatgatatcgaaaatattattcaagcggtgaaagacacggtggaggatcttcgccgaggcggatttattccggaaggtccggattcccctgatggcggaggccgtaaaaagtccgggacgcgcgagctttcacctgaacaaaagcagttggttatggcatcccattacgggaatgaagcttccgcggctttaaaccagtccataatgctgaaagtgaagggcgaactgcagtatacaccattaaaacaagccgtccggcatatcgttgaccgtcatgaagctttacgtacggtgattcatcccgatgacgaggtacagcaagtgctggaacggatgaatatagaaatacctgtcattgattttaccggtcacccgcatgaacatcgggagccggaaatccaaaaatggctgacagaagatgccaagcggccgtttcatttccatgaacaagagcctttgtttagaatccatgtgcttacatcggctcacaatgaacatctgattgtgctcacgttccatcatatcattgccgatggatggtcaatcgccgtttttgttcaagaactggagagcaactacgcggcaatagtacaaggaataccgatttcaccgaaagaggcagatgtttcgtttcgccaatacttagactggcagcaggcacagattgacagcggccattatgaagaaggggtccgttattggcggcgtcatttttctgaaccgatacagcagccaattctgccaagcacagcttctgtccgttatccgaacgggtatgagggagaccggtgtaccgtcaggcttggacggccattgagcgaggctttaaggtcattaagcattcagatgaaaaatagcgtatttgtgacgatgctgggtgcatttcatctttttctgcaccggcttaccaaacagtcaggccttgtgatcggggtccccgcagcaggtcaatcgcatatgaaacagcatgatctgattggaaattgcgtcaatatgattccggtgaagaacacgtcttcttcagaaagcactttatccggttatcttggcagtatgaaagaaagcgtgaatcttgcaatgcggcaccaagccgtcccgatgacactggtggccagagagcttccgcacgatcaagtgccggatatgcgtattatctttaatttagacaggccttttcgaaagctgcatttcggaaaggcggaggcggagcccgttgcatacccggtaaaatgcaccctatacgatttatttctgaacataacagacgcgcatcaagaatatgttcttgatttcgactttaatacgaacgtcgtcagtccggaaatcatgaaaaagtggggagcgggttttacaaaattgctgcaaaaaatggttgagggagattcaatccctcttgacgccatgatgatgttttccgatgaagaacagcatgatttacaagcactttacgccgaacaccagaagcggatcacttcaataggaagcaatacggcaaattttactgaagcctatgaggcgccggtaaatgaaacggaacggcagctggcgcggatttgggaggaacttttcggccttgaacgggttggcagatcagatcgcttcctggctctggggggaaactcactccaggcaacgcttatgctttccaaagttcagaagacatttcatcaaaaggtttccattggacaatttttcaatcaccagactgttaaggaattagcacgtttcattcagaacgaaacgaaagtcgtgcacctcccaatgaaggctgccgagaaaaaagcgtattacccgacatcgccggcacagcaaagagtatatttcctgcaccaactggaaccggatcagctggcgcaaaatatgttcggccacatatcaataacagggaagtacgatgagcaagccctgatctcatctcttcaacaagtgatgcagcggcacgaagcgtttcgcacgtatttcgacattatagatggcgatatcgttcagaaacttgaaaacgaagttgattttaacgttcatgtccggacaatgagccgggatgaatttgatgcctattcagaccggtttgtaaaaccgttccgcctggaccaagctccgttagttcgtgcggagctgatcaagattgaaaacgagcaggccgaactgctcatcgatatgcatcatatcatttcggacggttattccgtcaacatccttacaaatgaattgctggctttatatcatcagaaaccattaccggacattgaatttgaatataaagatttcgcagaatggcaaaaccaacggctgaatgaggatgccatgaagcggcaggagacatattggctggaacaatttcaagacgaaattcccattctcgacctgccgacagacggttcaatagcggcagaacggtcttctgagggacagcgtgtgacatgctccttacagccggatgtcatccgttcgcttcaagatttggcgcaaaaggcggaaacgactctctatacggtgcttctggccgcctataatgtgctgcttcataaatatacgggacaagaagacattgtcgtaggcacgcctgcttcaggaagaaatcatccggatatcgaaaagatcatcggtattttcatacaaaccattggaatccggacgaagccgcacgccaatagaacgtttacggattatctggaagaagtaaagcggcagacgcttgacgctttcgaaaaccaagactatccattcgaccggcttgtggagaaattaaatgtacagcgggaaacaaccggaaagtctctgtttaatacgatgtttgtgtttcaaaacattgaatttcatgaaatccggcacaatgaatgtacatttaaagtgaaagaacgaaatccaggggtctctttatatgatttgatgctcacgatcgaagatgccggtcaacagatagagatgcattttgattataaaccaggacgattcacaaaagacaccattgaacagatcaccagacactataccgccattttaaacagccttgctgagcagccggagatgacattgtcttctgttcctatgctgtctgaaaccgaacggcatcaactgctgacggagtgtaatggcacaaagacgccgtatccgcataaggaaacggtatatcggtggtttgaaatgcaggcggaacagagtcccgatcatgaagccgttatttttggcaatgagcggtatacgtacagacagctcaatgaacgggcgaaccgattggcgcggacgttacggacaaaaggcgtacaagcggatcaattcgttgccatcatcagcccgcatcggatcgagctgattgtcggaattttggctgttctgaaagccggcggcgcatacgtgcccattgatcctgaatatccggaagatcggatccaatatatgctgagagattcaagagcggaggttgtgttgacacagcgcagcctgctggatcaattaccgtatgatggtgacattgtgcttttggatgaggaaaactcataccatgaggagcactcgaatcttgaatcggacagcgatgcgcatgatttggcctacatgatctatacgtcaggttcgacgggaaatccaaaaggtgtactcattgagcatcaggggctggctgattatatttggtgggcgaaagaggtttatgtaagaggtgagaaaaccaactttccattatactcttccatctctttcgatctgactgtgacctcgatatttacaccgctggttacgggaaataccatcattgtctttgacggcgaagacaaaagcgctgtgctttctgagattatgcgggactcaagaatagacatgatcaaattgaccccggcacatctgcacgtcatcaaggagatgaatatcgctggcggcaccgccatacggaaaatgattgtcggcggagaaaatttaagcacccgtctggccaaaagtgtcagcgagcagtttaaaggccggctggacattttcaatgaatacggaccgacggaagctgtcgtcggatgtatgatttatcacttcgacgcagaacgggacaagcgggaatttgtaccgatcggcactccggctgccaacacggatatttatgtggccgatgcaagcagaaacctggttccgatcggggtaatcggcgaaatatatatcagcggaccgggtgttgccagagggtattggaaccgcccggatttaacggaagagaaatttgttgaaaacccgtatgtcccgggagcgaaaatgtacaaatcaggggatttggctaagcgattgaaggacggaaatcttgtatatattgggcgcgttgatgaacaagtcaaaatcaggggacaccgaatcgagcttggtgaaattgaagcagcgatgcataacgcggaagcggtgcaaaaagccgcggtaacagtgaaagaagaagaagacggcttaaaacaattatgcgcgtattacgtaagcgacaagcctatagcggctgcgcagcttagggaacatttgtcatcccagcttccggactacatggttccgtcctattttgtccgtctggagcatatgccgttaacatccaacgggaaaataaaccgtaaggcgctgcctgcaccggaagcgagtctgcagcagacagctgaatatgttccgccgagtaatgagacggagtccaaactgacagatttatggaaggaagtgctcggaataagccatgcggggatcaaacataatttctttgatctcgggggcaactccatccgagcggcagccttagccgccagaattcacaaagagctggatgtgaatctgtctctcaaagacatattcaagtttcctaccattgaacaattggctgacaaggcgttacacatggacaaaaatcgatatgtaccgattccggctgcaaaggaaatgccatattatccggtttcttcagctcagaggcggatgtatttattaagtcacacagaaggcggcgagctgacttacaatatgacgggtgccatgaatgtggaagggacgatcgatcccgaacggttaaacgccgctttccgaaaattaatcgcgcgtcatgaagcgttgcgtaccagctttgatttatatgaaggcgagccggcacagcgtattcatcagaacgtcgactttacgatagaacggattcaagcaagcgaagaagaagcggaagaccgtgtgcttgatttcatcaaagcgtttgacttagccaagccgccgctgatgcgggccggactgattgaaattgaacctgcgcggcacttgcttgtggtggatatgcatcatatcatttctgacggcgtgtccgtcaatattctgatgaaagatttaagccgaatctacgaggggaacgaaccggacccgctctctattcaatataaagactttgcagtttggcagcaatcggacattcagaaacggaacatcaagagccaggaagcgtattggctggatcagtttcacggtgatattcctgtactggatattcctgcggattatgagcgacctgccatacgcgattacgaaggcgaatcatttgaatttcttatacccgaacacttgaaacagcgtttaagccaaatggaagaagacacaggagcaacactgtatatgattttattggcagcctatacgattcttttatccaaatacagcggacaagaagatattatcgtaggaacgccatctgccgggcggactcatctggatgtagagccggtcgtgggaatgttcgtcaatacgttagtcattcgcaatcacccggcgggccgtaaaacatttgatgcctacttaaatgaagtaaaagaaaacatgctgaacgcctataaaaatcaagactatccgttggaagaattaattcagcatctgcatcttccaaaagattcaagccgcaatcctttattcgatacgatgtttgtgctgcaaaatcttgatcatgctgaattgactttcgattcccttcaactcaagccgtatccatttcatcatccggttgccaaattcgatttgaccttgtcgattcaggcggaccgcgacaactatcacggactgtttgaatattcgaaaaaactgtttaagaaaagcagaatcgaggttttatcaaacgactacttacacatcctatcggcgattttggaacagccaagcattctaatcgaacatatcggattgagcggcagcaatgaggaagaagagaacgcgcttgattctattcaattgaacttttagggaaaagcattatttctttaaaatatataaaatgaggtgctccaatgtcggtatttaaaactcaagaaacgtactgggaaaacctgtttgatgaagaagacggtctaagcgcattcccttactttaaagcagcggataaagcgtcgttggtccgtaccggctaccaggaaaaatgcatctgccgttccttatctccggaagtatctcaaagaatcatgacaatggcgaatcattccgatatggcggcctatctgattttattggcgggtattgaatgcttgttatataaatatacggatcgaacgagcctgattcttggcattccaacggtatcgaagcaaaaagccggccagtcagccgttaacaacattgtcctcttaaaaaatacgctttcaaacgagagcacatttaaaaccgtattcgggcagctgaaagaagccgttaatgattctctgaaaaatcaaaacctgccgtttagaaaaatggcccggcatctaagcgtgcaatacaatgacgagcatatgcctttgattcataccgtcgtttcgcttaacgaaattcattccttgcaatgtaaagaagatactgcaaccgatacgctgtttcactttgatttggagaacaacgggattcatttgaagcttttttataacggcaatctgtacgatgagcgctatatcaatcaaattgtatcccatttggatcagctgctgtctgtgatcctgtttcagcctcaagccgcgatccatacggcagagatcttaccggaagcggaaaaacagaagctattgtttgattttaacgacaccgtcagagatttctccgggagcagaacagtctatcaattatttgaagagcaggcagaaagaacgcctgagaatgcggccgtcaaatttaaaaacgaccatttgacgtacagggaactgaatgagaaggcgagccgtttggcaagaacattgcgtaattgcggggttcaacccgatacgttagtcgccattctcgctgatcgttcattagagatgatcgtatccattatagctgtttggaaggcagggggcgcttatgtgcccctggatcctgaatatccaaaagagcggcttcaatatttgcttcatgatgcggatgcagacgttctccttgttcagcatcatttaaaaaacagtctcgcctttgacggcccggtgattgatttgaatgatgaaacatcataccatgccgattgctcattgttatcaccagtagcgggacacagccatttagcctatgtcatttatacgtcgggtacaacaggaaagccgaaaggggtcatggttgaacacggcggcattgtgaactcgcttcagtggaagaaggcgtttttcaggcattctccggcggatcgcgtacttgtcttgtacccgtatgtttttgatgcgttcattttaaatttcttcggcccgctcatctcaggagcaactttgcaccttttgcctaatgaagagaataaagaaactttcgccattcaaaatgccataaaacaagaaagaattacccatttttcaacttccccccgtcttctgaaaacgatgattgaacagatgaacagagaggatttcatccatgttcagcatgttgttgtaggcggtgagcagctggaaacagatacagttgagaagctgcattctctgcagcctcgcattcggatcaataatgaatacggaccgacagaaaacagcgtggtatctacatttcaccctgttcagtccgctgatgaacagatcacaatcggcagcccggtggccaaccatcaagcttatattttaggagcgcaccatcaaatccagccgatcggcgtaccgggagagctgtatgtcggaggagcgggagtggcccgcggctacctcaatcggcctgaattgacggaggaaaaatttgtggagcatctgcatgtccctggtcaaaagatgtataaaacgggggatctcgccagatggctgccggatggaagaatcgaatatttagggcggattgatcatcaagtgaaaattcgcggctaccggattgagatcggcgaggtagaggcagccatgttcaatctggaaaacgttcgtgaagccgcagtcgtcgcgcgggaagacgcagacggggccaaacaattgtatgcctattatgtcggcgagccttctttgaccgctgcgcagttcagagaagaattatcccgggaactgccgaattatatgattccctcccgctttatccctttggaacgcattccgctcacttccaatgggaagattgatatgaaagctttgcctgctgctgacgaaaatacgcgggcggaatacgaatacatagccccgcggaacacaatagaagaactgctggcgtccatctggcaagaagtattaggggcagaacgtataggaattctggataatttctttgattttggcggagattcgattaaatcaattcaggtgtcatccagattgtatcaagccggatacaaggttgatatgaagcatttgtttaaacacccctcgattgctgaacttagtcagtttgtagcaccggtcagcaggatggctgatcaaggagaagtgaatggcggaaccaagctgaccccgatacagcattggttttttgagcaaaaaatgccgcatgcacaccattacaatcaggccgtcatgttatattcggcggaaggctttaaagagggcccgcttcgccggacgatggaacggatcgcgtcgcatcacgatgccttgaggatgatttttgaaaaaacgccggacggatacgctccgcgaattacaggaacagatgaaagtgaactattccatctggaagtgatgaattataaaggggaaaccgatccggctcaagcgattgccgataaagcgaatgagattcaaagcagcatggtattagacaaagggccattgatgaagctcggtttgttccaatgtccggacggagatcatttgctgattgcaattcatcatttgctgattgacggtgtatcctggcgtattttgctcgaagattttgcaagcggttatgagcaggcagaacgcatacaaacgatccagctcccgcaaaaaacagactcgtttccattctgggccgatcaattgtccaaatatgcggcggaaaccgatatggaagaggagattgcgtattggaccgagctttcaagtataaagcctcagccattgcctaaggacactatcagcgaaggagcgttattaagagacagcgaagaagtgacgattcaatggacaaaagaggaaacggagcaattattaaaacaagcgaaccgcgcctacaacacggatatcaacgatctgctgctgacttcgttagggctggctgttcacaagtggacaggcacggaagacattgtcgtgaatttggaaggccacgggagagaaccgattattccggatgctgacatttcccgcacgataggatggttcacaagccagtaccctgtcgtcctgaggatggaagccggaaaaaacctgtcgcagcggatcaagatcgttaaagaagggctgcgccgtatccctgacaaaggaatgaattacagcatcatcaaatatatatccgggcatccggaagccgacagcctgcagctgaaaccggagatatcgtttaactatttgggacaatttgaccaagacctgaagcatcaggctttgcgcatctcgcctttttccacagggttatcaatgaacgaaaaccaagagagaacggccgtgcttgatttgaacggcatgattgccgaagggacattatcactgacactgagctacagcagcaaacaatacgaaagatctactatggctcaatttgcccgggggttgaaagaaagtctgcaagaagtcattgcacattgcgtaagccggcagcagacttctctcacaccaagtgacatcctgttaaaagacatctcaatcgacgaactggaacagcttttggagcagacgcgtgaattaggcgaagcggaaaatatttatccattaacgccgatgcagaagggcatgctgtttcacagcttatttgatccgaattcaggtgcttattttcagcaaacgatgtttgatctgcatggagatctggaaattgattcattttcaaaaagcttggacggcctatcgcaaaaatatgatattttccgcacgaatttttacagaggctggaaagatcagccgctccaaatcatattcaaaacgaaaaaaatcggttttcaattcaatgacttacgagagatgaaggaatcacaaaaagaagcgatgattcagaaatatgccagagaagataagatgcgggggttcgacttagaaaaaggcgcgttaatgcggttattcatccttcgtacggatgaaaaaacataccgttttatctggagtttccaccatattttgatggacggctggtgtctgccgctgattacaaaagaaattttcgagaattactttgctttgcttcagcaaaagcagcctgaacaatcgtcaattactccgtacagtcaatatattgaatggctcggccggcaagatgcgaaagaggccacggcttattgggatcagtacttggagggatatgaggagcaaaccggccttcctaaggatcaccatgcagcggaggacggacgatacgttcctgaaaaagtgacgtgtgacataagctctgatctcacttcgaaaatgaagcggacggcaggcaagcatcatgtcacgctgaacacgctgctgcagacggtatgggcggttttgctgcagaaatataaccgcagccgggacgttgtgtttggaagtgttgtatccggaagacccgctggaattccaaacgtggaaaccatgatcggcttattcattaacaccattcccgtccggttccggtgtgaagccgggacaacgtttgctgagcttatgaaagaggcgcaggaaagggctgtagcgtctcaacaatttgagacacacccgctgtacgatattcaagcgcgtacaacgcaaaagcaagatttaattacacatttaatgatattcgaaaattatccggttgatcagtatatggaaagtataggccgccaaaacggaacatccatcacgatttccaacgtacaaatggaagaacagaccaactacgattttaatttgaccgttataccgggcgacgagatgaacatctcttttgaatacaatgcaaatgtgtatgatcgggcaagcatagagcgggttcgggaacatttcatgcaaatcctgcatcaagtcgtgacagatgcggatatccgggtggatcaagcggaattgttaacggaaggcgaaagaagaacccttctgcagacgcttaacgacacggccgcgccgtttccgcagacgccggttcatcaattatttgaagagcaatcggagcgtacgcccgatcaagcagccgtcattgataaggacaggcagctcacgtacggagagctcaataagcgggccaaccgcctggcgcgaacgttaagagcgaaaggagtgcagacggatcagcctgtagccatcatcacaagaaacagcatcgaatcggtggtcggaatccttgccgttttaaaatcaggcggagcctatgtacctatagatccggaatatccgcaagaccgcatccggtatatgctggatgactcccaagccggaatcgttttaatgcagcgggacgtcaggaaacagcttgcctatgaaggcgtcacggttttacttgatgatgaaagttcttatcaccaagatggctctgaccttgctccgataagtgatgtgagccatttggcatatgtcatttatacgtcaggttccacaggccggccaaaaggcgtactaatcgagcacggaggcttgaccaattatatttggtgggcgaaagaagtttatgtaaaaggcgagaaagccaacttcccattgtattcgtcaatttcttttgatctgacggtgacttctattttcacgccgcttgtcacaggcaatgcaatcatcgtctatgacggagaggataaaacagctctgcttgaatcaattgtgcgggacccgagggtggatatcattaaattgaccccggcccatttgcaggtcttgaaagaaatgaacattgccgatcaaacggctgtccgaagaatgattgtgggcggggaaaacttaagcacccggttagcccgcagcattcatgaacagttcgaaggccggattgaaatatgcaatgagtacggaccgacggaaaccgttgtcggctgcatgatttaccgttatgatgccgcaaaggacaggcgggaatcagtaccgatcggaaccgctgcggcaaatacgagcatttacgttcttgatgagaatatgaaacccgcgccgatcggtgtcccgggagagatctatatcagcggcgccggtgtggcaagaggatatttgaaccgtcccgaattaacggcagagaaatttgtcgatgacccgtttgaacccggagcgaagatgtataagaccggagatttggcgaagtggctggcggacggaaacattgaatatgcgggcagaatagatgaacaagtgaaaatcagaggctatcgtatcgaattaggcgagatcgaggcggcactgcttcaagaagaagtgattaaggaagctgtcgttacagccagagaggacgtccacgggtttaaacaattgtgtgcatattacgtgagcggcgggcaaacaacggcagcccggctccggaaacaattgtctcaaacccttgcaagttatatggttccggcttattttatcgagcttgatgaaatgcctttaacttctaacggaaaaataaacaaaaaagggctgccggctccggatttcgaactgcaggacagagcagagtataaagctccccgaacaaaagctgaagaaatattagtttctgcctgggaatcggtattaggcgctgaaaacgtcagtattcttgataatttcttcgatcttggcggagattccattaaatccattcaagtatcctccagattaaatcagcaaggatacaaaatggaaatcaaagacttgtttcaatatgcaacaattgcagaattgagtccgcatatcaagcagaatctgcgtatagccgatcaaggtgaggtcaaaggaaaagtcagcctgactcctattcagcattggtttttcgaacaaacaacaacagatcagcattattacaatcaagccgtcatgctgcatgcgccggaaggttttcaggaaacgcagcttcgtcaaaccctgcaaaagcttgctgaacatcacgatgcgctccgcatgacgttccggactacggaaaatggctgtgaggcacagaatgaagaaatcacccaaagcggactgtaccgcttagaagtcatgaatctgaaagaagatcccgatccgggacgtacaattgaagccaaagctgatgagatacaaagcagtatgcatttaagtgatgggccgttaatgaaagccgggttgtttcaatgcgcagatggagatcatttgctcattgccatccatcatttgattatagacgggatttcatggcgcatactactggaagatatcgttagcggctacaagcaagccgagaacgggcgagtgattcaactgccgcaaaaaacagactctttccaattatgggctaagagactgtcagaatatgcgcaaagtgaaaccataaaacaagaacaggaatattggacaaaaatcgaacaaaccgaagtcaaaccgctgcctaaagattttcatgaaacccatacaactgcaaaagacagcgaaacagcaactgtggaatggacgaaagaggaaacggagctcttattaaaacaagcgaatcgcgcttatcacacggaaataaacgatttgcttttaacttctctgggtctttccatatcgcattggtcaggactggaacaaattccgattcatttagagggacacggccgagaacagattatacaagatatagatatctcccgcacggtcgggtggtttacaagtctgtatccggttgtgctgcacgcgcagccgggcaaagaaatctctgattatatcaagacgaccaaagaaggattgcgccaaattccgtataaagggatcggatatggaatagcaaggtacttaagcggcggaatgccatcgaaactcaatcctgagatcagctttaactacctgggacagtttgaccaagatttacagcagcatggggttcagttatcttcttattcttgcggttcagactcaagcggaaatcaagaaagaccgtatgtattgaatataaacggaatgatcaccgagggccggctgaagcttacgatcagctacagcagcaaacagtacgcaaaagaaacgatcatgcggttatcggaaacgattcaaagccgcctgcggacaatcattacgcattgcgttcataaagaacaatcggaactgacgccaagcgatattttgttaaaaggcatatccattgacgaattggatcagctcctcattcaactgccgcatgcaggtgaggttgaaaacgtgtatccgctcactccgatgcagaaaggaatgctctttcacagcctgctggacgaggcctcaagttcttattttgaacaagcatcgttcgatttgcagggagagttaaagattgattggtttaaagcaagccttgaacgattatttgaaacatacgccgtgctcagaacccgtttttacagcggctggaacgatactcctttacaaattgtctataaaacgcaaacaccgcaaattcattttgcagatttgcgtgatatagaggagcacctgagagaggatacaatcgcagcctatcaaagagaagacaaggcaaaaggatttgacttggctcgggatccgctgatgcgcatagcgattttccgtatggaagaccgcaaatatcatttgatttggagcttccatcatattgtgatggatggctggtgcctgtctcttatcacgaaggaagtgtttgatcattatagcgccttacaggaaggcagggaaccagaaccgccatcggcagttccttacagcgactatatcgagtggcttgaccgccaagatcagggagcggcaaagcggtactggagcgggtatcttgaaggatataaaggtgaaaccacgcttcttcataaaatagcgcagcatgaacaaaaagaatacgcttatgccaatgcgatctgccgatttgatcacgaacagacaaaacaattacagcagatcgcaaatcagcatcaggttacgttaaatacgttgatccaaacgttatgggggattttgttacagaaatacagcgggtccgcagacgttgtcttcggcagtgtcgtgtcgggaaggccggcggaaattcctgatgtggaacagatgatcggcctgttcatcaataccattccggttcgcatccgctgcgatgaggacagcacttttgctgatacgatgcaaatggttcaacaaaacgcgctggcttcccaatcgtacgatacctatcctttatacgaaattcaggcccaaacggaacaaaagcaaaacttaattgatcatatcatgatctttgaaaattatccgatagggcagcaagttgaagagggccatgatgctgcggatttaaatatcgtgaatttccatatagaagaacacacccattacgattttaatgtagttgtcatccctggcgaacaactcaccgttcattttagttttaaccgaaatgaatatgaacaatcagaggcagagcggattcgcggacattttgaacagcttatgcagcaagtattgcagctgccgtctgtcaaagtagaagaaatggaacttctgacgcagcaagaaaaagaacagctgcacagccgttttcagtctaacgaaatgcattacccacgtgaacaaacgattcatcagctgttcgaggaacaagcactccggacgccggaccatgaggcggttatattcgaggagcagcgtatgacttaccttgagttaaatgaacgggccaatcaactagcacgcactttacgagctgaaggcctacaggccgaccagcttgttgcgatcatggctgagcgttctctagaaatgatggtcgggatttatgcaatcctgaaagcgggaggcgcttatgtgccaatcgacccggattacccggaggaacgcatacgctacatccttgaagattcaggagcgaccctgctgctgtcacagcgtcacgtgaaagaacgggttgcttttgcaggaacggtcatcgatctcgatgatacttccgtttacgatgatgacgtttctaacttggagccgctgtccggtgcgggcgatagggcatatgtaatctacacgtccggatcgaccggcaagcccaagggggttatggttgaacatcgtccggttataaaccggttgatgtggatgcaaaaggcttatccgatcggcagcggcgatacgattttacaaaagacagcgatcaccttcgacgtctcggtatgggagctgttctggtgggctttgaccggtgcgaaggtgtgcctgcttccgctcggcggagagaaagaccctgaagtgatttggaacacaatagaagagcaaagtatcacgacaatgcatttcgtcccggcgatgctgcacgccttcctgaagtttgcggaaacacagacggcgagcggacagacaagcaagctgcgtacgttgcggcaagtgtttgcaagcggtgaggcattaatgccggcacatacggcaagatttcatcgccttattacgcctgtgaacggcgcccaactgatcaacctgtacggcccgacggaagcaacggtcgatgtgtcgtacttcaactgcgaagcaaaccaagcgtatgcatcagtaccgatcggcaagccgatctcgaatatacagctgtatatgatggcaccgggatcaatgcgtctacagccagtcggagtaccgggagagctttgtatcgcaggcgacgggctggcgagggggtacctgaaccgtccggagctgactgcggagaagttcgtggatcatccgttcgagcccggcaaacggatgtaccggacgggagatctggcgagatggctgccggacggtaacatcgaatatttgggccggatcgatcatcaggtgaaaattcgaggatacaggatcgaactcggcgaggtggaagctcagctcttaaagatagaatcggtacaggaagcagtagtcaccgctcttgaagacggagccggagaaaagcagctatgcgcatacttttcagcgaacaccgagctgatggtaagcgagctgcgaatagcgctgtcgcaggaactgccggggtatatgatcccgtcgtactttatccaactggagcgtttgccgttaacggcaaacggaaaaatcgaccgcaaagcattaccagcaccagaagaaggcgtgcaaacagggatcgaatatgttgctccccgtacagcggcggaagcgcagctggcgcatatctggcaagaggtgcttggacttccgcgtatcggcgtgaaagacaatttcttcgacatcggcggtcactcgctgcgggcaacgacgctgatggcgaagctgcacaaagagatgggggtcagcctgccgctgcgggaagtgttccgatcgccaacaattgaagaaatggcagaaacgattaccggaatgaaacacacagcatatacatctatcccgaccgttgaagcaaaagaatactatgccgtctcctcggcgcagaaacggctgtacattttgaatcagctgaaaggcggagagctgagctacaacatgccgagtgtcatgagagccgatggagctttggatcgggaacttgtcgagaaggcgatccgcaagctgattcagcgccatgaaacgctgcgtaccggctttgaactgatagacggagaaccggtgcagcggatctatgacgacgtccaatttgcagtggaattcactcaagcgaaagaagaacaggcggaagccctcgttcatggttttgtgcgtgcatttgacttggagaaagcaccgctgctgcgggtaggattgatcgagcttgcaaaagaccgccatttgctgctgtttgacatgcatcatatcatttccgatggcgtatctatcaagaatttgattgaagagttcgtttcattatatgaaggaaaagaattcccgccattgcgggttcagtataaagattatgcggcgtggcagctgtcggatatgcaaagcgaacggatgaagaaacaggaagcgtactggctggatgtgttcagcggagaggttccggtgctggatatgccaaccgactacggaagaccggctgcgcggagctttgatggaggacaaatcgagtttgtcatcggaccggagttgacggaacagctgaaaggcttggcgctgaagagcgaaagcacgctgtacatggtcctgctggctgcttatacgaccatgcttgccaaatacagcgggcaagaagacatcgtagtaggcagcccgattgccggaagaacccattcggatttggaaagcttaatcggcatgtttgtgggcacactcgcgatacgaacgaatccggtcggggaaaaaacattccgagaatacgtgcaggaagtcaaagagcatacattaaaagcgtacgaaaaccaggagtatccattcgacgaactggtggacaagctgaatgtgtcccgggatttcagccgccatccgctatttgacacgatgttcatatggcaaaacacagaacagggagaattgagcctcgatgatgtgcgttttaccccttatccggacaaccatgcgatggcgaagttcgacctgacgttccaagcggcagaaaatgaagacggaattacaggtatgatcagttacgcggcagcgctgtacaagcaggaaactgcggaacgcatggcaaagcactttatccaattgatcgaggcgattgcgaatgatccgcaggcgccgctttcatcgctggagatgatcaccgcgcaggagaaagagcagattgtggaaagatggggtcaaccggcgatagactgcccaagggacaaaacaattcaccaattgttcgaggagcaggcggagcgcacgccggaacatacggccgcagtttacgagaaaagccgattcacataccgtgagctgaatgagcgggccaaccgcctggcgcggattttaagaagcgaaggcgtgcagcctgaccagcctgtgggtattctggcagaacgttctctggaaatgatcgtggggattatggcgatcctgaaagccgggggcgcgtatgtgccgatggatccggacagtccgcaggaacgcctccgctatattctggaggattcaggagcaaaggttctgctggcacagccccatttacaagatcgtgtatcctttgccggagagattttactgctgaatgacgaacgaatgaacagcggggatggctcgaatctggtgacggcagccggaccggatcacttggcgtatgtgatttacacatcaggcacaaccggcaagccaaaaggcacgctgatcgagcatcgccaggtccttcatttgatggaggggatccgcggacaagtgtacggtgcttatgattcgggattgcgtgtgtctctgttggcaccgtactatttcgacgcatcggtcaagcaaattttcgcggcactgttagggggacatgcactgtatatcgtccctaaagcatcagtatcagacggttatgccttgtcaaactattatcgcacccaccgcattgacgtaacagacggaacaccgtcacatttgcaattgcttatcgctgcagacagccttcatggggtaacgatccggcacatgcttattggaggagaggcgctcccgcaggcgacggtggcgcaattgcttgaattgttcgcttcgaacgggtcatcaatgccgctcataaccaatgtatacggtccgacggaaacctgcgtggatgcatcggtctttcacatcgtaccggagacattggcatccgctgacgacggcggttacgtgccgatcggcaaaccgctgggcaacaaccgtgtgtatattgttgattcccatgatcggatgctgcctataggtgtaaaaggtgagctgtgcatcgccggagacggagtaggacgggggtatctgaacttgcctgaattaacgggcgaaaagtttgtggccgatccgtttgtaatcggagagcggatgtataaaacaggcgaccttgcccgttacctgccggatggaaacattgaatatgccggaagaaaggatcaccaggtcaaaattcgcggttaccggatcgaacttggcgaggtggaagccgctcttctcaacatcgagcatgtacaagaagcggtgatcgtggccagagaaaatgcagaggggcaaagcgatttgtatgcctattttacaggggagaagtcactgccgatcaatcagcttaaagaaaaactctccgatcaaataccaggctatatggttccttcatacttgatgcaactggagcaaatgccgttaacctccaatggaaaagtgaatcgcagcgcgttaccgctgcctgaagcaggcttgcagaccgggattgactatgttgctccaaggacaagaccggaagagcagctggttcacatctggaaagaagtattgaaggtagaacaagtcggcgtgaaagataactttttcgatctcggcgggcattcgttacgggggatgacgctcgttaccaagatccataagcaattcgacaaaagcatttcattgagagaagtgtttcaatacccgacgattgaagaaatggcgagggtcattgcaggcgcggaaaccagcggtccggatgaaatccctgttgcagaagccaaagatgtttatcctgtatcttctgtgcaaaagatggtttacctgtctacacaaattgaaggcggagaactaagttacaacatgccggggattttgacattggaaggcaggatcgacatgaatcgtttacaatctgcgttccaaagtctgatccagcgccatgaatcgctacgaaccggatttgaaatggtccgcggagagctggtgcaggtgatcaagccgcaggcggatttctctatagaaaggtacaaagcagctgatgaagaggtcgaggagctgttccgcaatttcgtgcggcctttcgatctcagtcaggctccattgcttcgggccggactcatcgaattagaacaggacagacatgttttcatgtttgacatgcatcatatcgtttcagacggcgcttctatgaatatttttgttgaagaactgattcaattgtatgacggcaaagaattaaccccgctccggattcaatacaaagattacactgtatggcagcagcaggcggagcagagggaacgaatcaaaaggcaggagagctattggctgaatgtatttcatgaggaactcccgccatttgagctgccgaaagattttgccagaccgcgaattcgaagctttgaaggcaagcgatacaatttcgccctcgatgagactgtgatccaggggataaaacagatggaagaattgaccggatcgaccgcttacatgatcttgctgtcagcctataacatactgctggccaaatacagcggtcaggaagatatcgtcgtcggtacgcctattgcgggaagaatgcatgaagatttacagcatattatcgggatgtttgtgaatacgctggccatccgtacggccccggctggagaaaaaacctttatggactatgtaacggaaacaaaagaaacgatgctgaaagcttatgaaaatcaagagtacccttttgaagaattagtcgagaaactgggagtgaaacgggacttaagccgtaatccgttattcgatacgatgtttgttctgcaaaatacggaacaaacggatatcgaattggactctctcgcggtcagaccatatgaacaaacgaatacggcggccaaatttgatttgcagctgaccttcgtgatgaatccgcacgagattcaaggaagctttgagtattgcacgaagctgtttaaacagaaaaccatcgctacgctgagcaaggattacgccatgattctgtcggcgatcataaaagacccatcgattcctttaaaagaaattcaattaagtgagaaagtaaacaaaagtgaacactttgcaagcgaaatcgaattgaatttctaaaaacggccgaaaccggctgtccccggcatgatgtttttacggggacagcggtcagccggctaaaacttactggagggatattaatgtcagaatttaagcaacaggagttgttctggagcagcatgttcgatgcggaagatcgtcccagtgcaatcccttcgtttcaaatgtcggactcagcaatagagcatgatgcgtcgagtgcacccaaccgtattcacagttcattgagccccgatgtatccctgcgcatcatgaagatgacgaataaatcgccaatggccgtttatatggttctcctggttggaatcgagtgtcttttgtacaaatatacgggggaagagggcgttattgtaggtgtaccgacctttgaagacgaaaccgatgaagaccttcgtttagaccaagtcatgttaatcaaacaaaacataaatgcggacagcacgtttaaatccatttttaatgaattcaagcatacgctgaacggagccatcttacatcagcacgttcctttcgataaaatggccggtccattaaatctgaactacgattcaaatcatttgccaatgatccacacgattgtatcactagatcagcttcaccccattcgttttagagaaacggctgcttctgatacgttatttcagttttccatagaaaatgattcgattcatttaaagttaacttataatgaacaagcttatgatcgccagtatatgatgcaagtgatcgaacatgtaaaccggattttttcgattttgttattccaacccgaccttatgatccgccagcttaatattctgtcagactcagagacaaatcaactcatcgcctataatcaaacggctgcagagtatccaagagaaaaaacgattcatcaatttttggaggaacaagcggaacgtacccctgatcaaacggctgttgtctacgaggatagccgtctgacgtaccgtgaattgaatgaaagggcgaatcaactcgctcggacactgcaatctgagggcgtacagccggatcagccggtcgggattatggccgaacgcgccctggatatgattgtagggatcttcgggatcttgaaagccggcggggcgtatgtaccgattgacccgggctatcccgaggaacgggttcgatacatattggaggattcggatacgaagttgttactcgtgcagaatcaatcgcaagagagagtaccttttacgggaaaagtgctggatatgaaagatccgcaaaacttttgtgaagacgggtcgaatgtagagccggctgctggtccggatcatctggcctatgttatttatacatcgggttcaacgggcaagccgaaaggggttatggttgagcatcggtcggtcatcaatcggctggtgtggatgcaggaaaaataccctctcgatgagcgggatgcgattctgcaaaaaactgcgatcacctttgatgtatcagtgtgggaactgttctggtggacgatatcaggttccagattggttctgttgccaaacggaggagaaaagaatcccgagctgattttagatacaattgcacaaaaaggtgtcagcacaatgcattttgtaccggcgatgctgcatgccttcctggaatccatggatcagaagccaagcgggatgttgaaacaaaaattagcgtcattaagacatgtgtttgcaagcggtgaggctttgaagcctgtacatgtcgcaggctttaaacacatcatcacatcggtgagccaggctcaaatcatcaacttgtacggaccgactgaggcaacaattgatgtatcatactttgattgccagacggaagaaacatatgcatcgattccgataggcaaaccgatttccaacattcaattgtatatattacatgctgatttggaacatatgcagccgatcggtgtggcgggagaactgtgcattgcgggcgatgggcttgcaaggggctacttgaatcgtcccgaactgacggccgagaagtttgtaaaccatccgattgcatcaggagaacggatataccggacgggagacttggcaagatggctgcctgacggcaatatcgagtatttgggccggattgatcaccaggtgaaaatccgcggttaccgcattgaaatcggcgaagtcgaaggcgctttttttcagctgccggcgatcaaagaagccatcgttatcgcccgggaaatcgagggggaaacatccttgtgcgcctattataccgcacaacatgctttaactgcaggcgagctccgtgaagagctgtcccgccagcttccatcctatatgatacctgcgtatttcgttcagctggaagagatgccgcttactttcaacgggaaaatagaccgtaaatcccttccttctccaagagagaatcttacaggcatgaactatgaagctcctcgaacagaactggaaaaaatactggccgcggtgtgggagtcggtcttaggcttagaacgggtcggaatctcagatcattttttcgaattggggggcgattccattaagtcgattcaagtgtcctcaagattataccaagccgggtataagtttgaaatcaaacacttgtttaaatacccaacgatctctgagcttgttccatacgtagagccggtaacccgaatcgcagaacaaggggaaattaaaggccgggcgctgctgacaccgattcagcattggttttttgaccagaaatacccggaattacaccattacaatcaagcggttatgctttattggaaagagggactggatgaatcaaagcttcgggacgtcatgaagaagatcacagagcatcacgatgctttgcgcatggtctatgttccgacagaagatggatatgaagcccgaaatcgcgggatcgatgaaggtgatctgttcagccttgaagtgatctcactacgcgaagaaaaaaatgtgtcccagacgatagaaaccatttccaatgagattcagcaatccattcatttagccgaaggaccgctcatgaaactgggattgttccggtgtcaagagggagatcatttgctgattgcggttcatcatctggtcatcgacggcgtatcgtggaggattttacttgaggatatagcagcagcttatgagcagcttcaaaacggcgaagcgatccggcttccgaagaaaacggactcttacctgttatgggctgaacagttgaatcgttatgcagaaagtcaggaattcgaagcggaaaatcaatactggttcagacagaaacataatccgcaacttacattgccaaaggacaatgaacaggagaccggtctggccaaagacaaggaaacggtcatcgttcaatggaccgttgaggaaaccgaacgtttattaaaaaacgctcaccgggcttattcgaccgatatgaacgatttattactgaccggtctgggaactgctattcatcgttggaccggatatgaagacattctcattgatcttgaaggacacggcagagagtctatcattccggatctcgatatttcgcgtacggtgggatggttcacaagtctatatccggtttcgcttcaaatcaaagctgatcaggatatcccgcagcggattaaaacagtgaaagaaaatttgcgtcagatcccccaaaaaggaataggttacggcctgatcaaatatttgtccgatcacccgaaggcacatgaatggaccggacatccggaaatacgtttcaattatttgggtcaatttgatcaagatgtccggaacggcaggatggagatatccccttactcaagcgggaaaacagccagtgacaatcgtcccatgacctatacacttgatatcaacggcatgatttcagacggccgattgtcgctggccatcagctattgcggtaaacaatatcaaagagaaacaatggaagcctgtgccgatctcttaaaaagcagcctgcagcaagtcatcgcacattgtgatgctcaagatcaaattcacctgacgccaagcgatatttcgttaaaaggtataacgatcggtgaattagatcaatttgtgcagcaaacgagtcatctcggtgacattgaaaatatatacccattaaccccgatgcagaaaggaatgttgttccacagcttgatcgattcggcttccgaagcttactttgaacaagccgcttttgatctgaaaggtttcttggatatcgatgcattcaggatgagtttggcgcatctggccgaaaaatatgacattcttcggactcttttttatacagaatggaaagatcagcctttgcagattgtattccggcaaaagccgattgaaacggccgttgaagatattcgcagcatgaacagtcatcagcgcagcgagtttattgccgattttgcaagaagagataaggcgcggggattcaatctcacccgggatgctttaatgcgcgtatcgatcctgcggacagaagaagaccaagcgcgattgatatggagctttcatcatattttaatggatggctggtgtttgcctcttgttacgaaagaagtgtttgaaacctattatgcgatactcgagcaaaggcagccgaagcggggagccgtcactccatacagccgatatatcgaatggctggatcaacaagatcacaagcaggcgtcagcctattggcgtaactatttagaaggttatgaagggcagactgttttgttacaagaacaaacttccgaccgggcgaaaggatacgaaaaaggtgagcatgagtttcgtttaggaaagcggctcacagacgaaatcaaacgggccgcaagccgccagcaagtcaccgtcaatacatggatacaaaccgcatggggcttattgctgcaaagatacaacgggagtcaggatgtcgtcttcggcactgtcgtatccggcagaccggcagaaattccgggaattgaaaccatggtcggtttatttatcaataccattcccgtacgtattcatacgcagcctgaaatgacagctgcacaagtattgaaaatgaaccaggagcgggcactggcttctcaaaaatatgatacatttccgttgtatgacattcaggctcaaactgagcaaaagcagcagttgatcaatcatattatggtatttgaaaattacccggttgagaaacaaatagaacatatgaagcaggatgacaacgcattagacattctcgattttcatatggaagaacacactcattacgactttacttttatagtgatgccggatggagaaattgacattcgttttgtatacaatcgcgatgtttatgaccaagcaagcgtcgaacggatgcagacgcatttcatgcaaatcatgaagcaaatggcggacgatcaggaaattcgcgttcaagaccttgatatcgtaacagcggatgagcgatcgctcctgatagataagttcaacgatacggcggctgagtatccaaaggaaaagacgattcatcaattgtttgaagaacaagcggagcgaacgccggagcaagcggcgattgtttttgaagataagaagctgacgtatcgggtagtaaatgaacgcgccaatcagctggcccgaaccttggttgccaaaggacttcaggccgaggagcttgtcggcattatggcggaacgttcaccggagatggtgataggcatccttgctattttgaaagccgggggcgtttacgtaccgatcgatccggattatccgaaagaacgcatccattatatgcttgaggattctaacgtctctatcttattattgcaacatcatcttctggaaggtaccgattatcaaagtcatactatcttccttgacgatccgtcatcatacggcgccgaagcatctaatctcaatctgaacgtgatgccaaatcaattagcctacattatttatacatcaggaacaacggggaatccgaaaggcacgctcattgaacataaaaacgtggttcgtctgttatttaataataaaaatgtttttgattttaatgcatcggacacatggactttgtttcattccttctgctttgacttttcagtatgggaaatgtacggagcgctgctgtatgggggcaaattagtgattgttccgaaacaaatagcaaaaaacccggaaaggtatttgcaattgttaaaatcggaagctgtgaccattttaaatcaaacgccaagttatttctatcaactgatgcaggaagagagagcagatcccgaatccaatttaaacatccgaaaaatcatatttggcggagaggcgttaaatccatccttcttgaaagactggaagcttaaatatcctttaacacaattaatcaatatgtacggcatcaccgaaactaccgttcatgtcacatataaagaaatcacggaacgggaaatcgacgagggcagaagcaacatcggacaacctattcctactctgcaagcgtatattttggacgaatatcagcgcattcaggtaatgggcataccgggcgaactctatgtggcaggagagggactggccagaggatatttgaaccgcccggaattaacggctgagaaatttgttgaacacccgtttgccgcaggcgaaaaaatgtacaaaacgggagatgtcgcccggtggctgcctgacggcaatatcgagtatttgggaagaattgatcatcaggtgaaaatccgaggctaccggattgaaattggcgaggtcgaagcggctttattgcaatcggaatctgtcaaagaagcggtcgtcatcgcaattgaagaagagggctcaaagcagctgtgcgcctacttgtcaggagacgattcattaaatacggcgcagctgaagcatcatttactgaacaaactgcccgcttatatgataccggcttactttgtacaaatggagaagatgccgataaccgcaaatggaaaaatcgatcgaaaagctttgccggctcctgagggaaataggctcaccggaaccgaatacgaagcgcccggaacgttgattgaaaagcagctggccgagatatggaagaacattttagctctcagcgacccgggaattaaagataacttctttgacgttggcggccattcgctcaaagtattgcaagtaattcatcaaatcaacgaccgtatgggaatcaaaatgcattatcaagccgtatacgattttcctaccatcgaaacaatggcacgcgccattcaagcggcagttttcgagtccaagacggataacgtattcgtcaagatgaatcagaacggtttaatccctgtgttctgtttcccgcctttaatcggatacgggctggtctataatgaaatggcgaaaagacttgacggccgctgcaccgtctatgccgctgatttcctagaagagccgtcttacgaaaaagagatcgttgaccggtatgcagaaagcatgataggcattcaggaacaagggccctttgttttacttggttactcctcggggtcgaatttggcttttgaggttaccaaagccttagagaagcgcggacgcatcgtatcggacattatgatgcttgattctaaaagagccgtttcggtgaattatttttcggaagaggaaaccgaagagatcattcatcggaatctggatatcattccggattattatagagaattattaaccattccttcgattaaggataaaatcagaagctatctcacatatcacaataaactgatcaattccggcgcggtgaacgccaacattcatcattttctatgcggcgagttgaccgatagaggatggaagcaatcaaccgcacagcattaccttgagtacaaattaaaaggagaccatgtgacgatctttgaccctcacaatatcgaagaaaatacggatacaattcgatctattattaaaaggattgaagagcggcatcatcacggacttgttcttgaagaacaactgtcaatgggatcgtttgctggcgacacgaagtttgacaaaatgtaaatgattcagggcaaaatgccgctgactgcaaccggcggcatttttcataaaagagggtcagatatttgcaacgttttcactctaaaaatcattcattttacgcattcttcatgacctgttgttatcatattttttaaaaacctaatatgcggaaacaggaggatgttaagcagatgaaaaagtgcagcgtatgtttattgattcttgctttattattgagctgtttacctggggaatatgcgaatgcggtaagcactccaattgcaaaacatgttgggaattcaaatccgcttatcgaccatcatctgggcgcagatccgtttgcgctgacctataacggaagagtctacatctatatgtcaagcgatgactatgaatataatagcgacggcacgattaaggataattcatttgccaatttgaataaaatatccgtcatatcttcagcggatatggtgaactggacagatcacggaacgattcccgcagcgggtgccaatggggcgaatggcggccgggggattgccaaatgggcaggagcatcatgggccccgtcagccgcggtgaaaaagatcaatggtaaggataaatttttcctttatttcgcaaacggcggcggaggtatcggggttctcaccgcagacagcccgaccggcccatggacagatcccatcggaaaagctctggtaacgccaaatacgccaggaatgtccggtgttgtatggctttttgatcctgcagtattcgtagatgatgacggtaccggttacctatatgccggcggaggcgttccgggcggttcaaatccaacgcaggggcaatgggccaatcctaaaacagcaagagtcatgaaattaggtcctgatatgaccagtgttgccggaagtgcgtctacgattgatgcgccttttatgtttgaagattcgggaatgcataagtataacggaaaatattactattcctattgtatcaatttcgggggcgcgcacccggccgataaacctccaggtgagatcggctatatgaccagctcaagtcctatggattctttttcgtatagagggcactttctgaaaaatccgggagcatttttcggaggcggcgggaacaatcatcatgctgttttcaattttaaaaacgagtggtatgtggtgtatcatactcaaactgtcagctccgctctttacggggccggcaaaggttaccgttctccccatattaataagcttgtgcataatccagatggctccctgcaagaggtagcggcaaattttgcaggtgtcaaacagctatccaatttgaatccatatcaccgcgtagaagcggaaacgtttgcctggaacggacggattttgacagaggcatcctcagcacccggcggcccggtcaataatcaacatgtcacaaacattcataacggagactggattgctgttggaaatgcagatttcgggtcaggcggtgccaggacgttcaaagcaaatgtagcgtccgctcttggcgggaaaatagaagtgcggctagatactgcaaacggtaagcttgtcggaaccttgaatgtcccttccacaggcggaacgcaatcttggagagaaatagaaactgcggtaagcggcgcatccggtgttcacaacgtattctttgtatttaccggaactggtacaggaaacttgtttaatttcgattactggcagtttacacaaagataagcaaagggagacaaaggtacgttttctaagtccataaacgacatatgaaggagaggaaaaaatgatatcgagcgtaaaaaaaacaatttgtgtattattggtatgtttcacaatgctgtccgtcatgctcttaggaccgggagttactgaagtttcagcagcaagtgatgcaacagttaatatatctgcagaaagacaagtgattcgcggttttggaggaatgaaccacccggcttggattggagacttgactgcggctcaacgggagaccgcttttggcaatggacagaatcagttaggtttttcggtcttaagaattcatgtagatgaaaatagaaataattggtacaaggaagtggagactgcaaagagtgcgatcaaacatggagcaatcgtttttgcttccccttggaatccgccaaacgatatggttgagactttcaatcataatggtgacacaacagctaagcggctgagatacgataagtacgccgcatacgcgcagcatcttaacgatttcgttaatttcatgaagagtaatggtgtgaatctgtatgcgatttctatgcaaaacgagcctgattacgctcacgaatggacatggtggacgccccaagaaatcctgcgtttcatgagagagaatgccggttccattaatgcccgcgtgattgcgccggaatcatttcaatacctgaaaaatatatcggaccccattttaaacgatccgcaggcgcttaggaatatggatatcctcggaacccacctgtacggcactcaggtcagtcagtttccttatcctcttttcaaacaaaaaggaggagggaaagagctatggatgacggaggtatactatccgaatagtgacaacaattcagcggatcgctggcctgaggctttaggtgtttcagagcatattcatcattcaatggtagagggagattttcaagcttatgtgtggtggtacatccgcagatcatacggccctatgaaagaagatgggatgatcagcaaacgcggatacaatatggctcatttctcaaaatttgtgcgcccaggctatgtaaggattgatgcaacgaaaaatcctgaaccgaatgtttacgtgtcagcctataaaggagacaataaagtcgtgattgttgccattaataaaaataacacaggggtcaaccaaaacttcgtgttgcagaatggaactgcttcgcaagtatccagatggatcacgagcagcagcagcaatcttcaacctggaacggatctcaaagtaacggacaatcatttttgggcccatcttccggctcaaagcgtgacaacatttgttgtaaagcgttaaaggcatcagcatcgcaataagccaattttcttactcaaaaaagaaaattggcttattttctgtgggagagaagtgttgatttttttaacgatacacagacattgggtataataatgacaatgacttcaaggagtgatcaatatatgtcacggcttcacagcaaagtattaatcatagacgacgaaaaagaaattttggaactgatcaaaaccgtattaataagagaaggcattgatcgcgtagtgacagcttcgactgcccgtgacggattggctcaatttcatcaagaaaatcccgatctggtgatattggatatcatgctgccagacggtgaaggctatgatatctgcaagcaaataagagacatttcacacgttcctattatctttttgtctgcaaagggggaggaaacggataaaattgtaggacttgccatcggcggggacgactacattacaaaacccttcagccctaaggaagttgcatatcgagtcaaagcgcagctgagacgggtctcttacttacagccttctcaaaccggaaccgtgataaaaaaaggaccatttgaattaaaccaacaacaagccgagctcaccaaaaatgaagcggctattgagttaacacctaaagaacttatgcttatgacctattttctgcagcatcccaatcgggtgatcagtaaagaaacactttatcaagctgtatggggagaagatttcttcggttctgacaatacggtgatggttcatatacgcaggctccgtgagaaaatagaaactgtcccatcaaaaccagactttctcgtcactgtgaaagggttaggctacaaatttgttgtaaaggatgcgtaaggatgaattggcgattaacaggcagatacatggtatctgtcatcatagtgaccatcattacagtcttcattaatttatttatttttatgttttggctcgttttccaggcgaacagccaacatgacgaagaaagtacaccggaaactttcacaagatcattccgacaatatgtcacgttatcgaacaatggtatcacagtaaacaaagagggccaaaaagctttaaaagagcagaatgcatggattcaaatattagatgaaaacggacaggatgtttatcatgatagagaacctaaaggactgaagaaaaaatatacgcctattgaaattgtaaatttacataaatataaggatgaacaattattatcaaccatttacgctggcgggaaaaaagtaaatggcaaggagtacagttactttatagggtttaaaaatccctctctcggaaaatttgtcctctcatatgataccaaggaatttgtgacgaagttcaatgcaggaaccatcatattattatcaatagatgcattgatcgcgttactcattggctatctattcagccggcagctcacaaaaccgctcggccgtgtcattcaaggaattcagcggttagctaatggagattatacgatcaaaatgaaatccaaaggcatttataaagatgtcttctataatgtcaatcatttatcggaacaactatcttcaagcacaaaagaaaaagataaattagagcaaatgcgtgaagagtggatcagtcatatttctcatgacattaaaacaccattagcatctattcaaggctatgcagaaatcatccaagatccaaattaccatctcacagccgaacaggtcagagagtacgcccagatcattgagagtaaatccctctatatgaaagatgtgatggaagatttaaatttaacgacaaggctgaaaaacaacgatgtgatgttacatacagaacgggtaaaccttgtatcgctgctgcgggaaacgttaattgatatgttaaacgattctagatatacggataagtccattgaactccaaacgaacgtggaaaagctgatgctgaaccttgatgcgatattgattaggagagcggtcacgaatctcattttaaatgccctcgttcacaatgatcctgatgtgaagatcgttgtacagcttgaacaaaaagaacggactcatgtgacaattaaggacaacggcaaagggatagaagaagaggagctggaaaaagtgtttgatcgctattacaggggcacaaatacaggaacgacgcatgcaggctctggtcttggaatggccatagcaaaggatattatccaaaagcacggaggggacatcaccattcacagcaccgcgggagaagggacaacgatagatatacaattatcataatggctatacaaaaaaacggttctgttgattaataacagaaccgttttttcctattgttccgaaaacaatttgattcctttgacaatgttccaaatgaaaaaatagatcgccacaaggaatgtaacagcatacgtcgcaagcaggaaaggcccggcgtgcctgatgtcattcataccaagtaaacctgaagcgatgatgccaatcccaaaaatcaaataaggaatcagatgcgtccacaaagattttttcgcatgatatttcacatcgtcctggcctaagaaatagacgataatcggaaacagaaacggcgcaaaaaatatactgaagtaacataatgaagacaacattttattttctctcaaaccttttcacctctatgatttattgaagggggaattcttctggctgaatccctcactgaagtacaatcttattgtacaactccaaccttaacccgtattaatccgaaccttacatcaaccttaaattaacaaggacgggcaaggactcgtcttcttacagcaatcataagattcaatgccatattgagactcatcacattcagcgtgtctacgttggaaatacatttaatttttcgattcgattgaaaaatgacgtgtaaagtcccgattcagtccggttttctttgttctatatgtgtcaggtgtgtcttattcaatagagatagagcaaattgacaggcttttacacctcccaaaaacaagaaaatagattgatagacaatcatgagaaagatttttacaatgagttcgagctcataagaaagagccaaaatgatgcgaaggaggaaaagatcagatatgaaacgggcaatttctatttttattacgtgtttattgattgcggtattgacaatgggcggcttgctgccttcgccggcatcagcagcagagacaaaaacgccagtagccaagaatggtcagcttagcataaaaggtacacaacttgtaaaccgagacggcaaagcggtacaactgaaagggatcagttcacatggattgcaatggtatggcgatttcgtcaataaagacagcttaaaatggctgagagacgattggggcataaccgttttccgcgcggcgatgtatacggcagatggcggttatattgacaacccgtccgtgaaaaataaagtaaaagaagcggttgaagcggcaaaagaacttgggatatatgtcatcattgactggcatattttaaatgacggcaacccaaaccaaaataaagagaaggcaaaagaatttttcaaggagatgtcaagtctttacggaaacacgccaaacgtcatttatgaaattgcaaacgaaccaaacggtgacgtgaactggaagcgtgatattaaaccgtatgcggaagaagtgatttccgttatccgcaaaaatgatccagacaacatcatcattgtcggcaccggtacatggagccaagatgtgaatgatgcagccgatgatcagctaaaagatgcaaacgtcatgtacgcgcttcatttttatgccggcacacatggccaatctttacgggataaagcaaactatgcactcagtaaaggagcgcctattttcgtgacggaatggggaacaagcgacgcgtctggaaatggcggtgtattccttgaccagtcgcgggaatggctgaattatctcgacagtaagaacatcagctgggtgaactggaatctttctgataagcaggaatcatcttcggctttaaagccgggagcatctaaaacaggcggctggccgcttacagatttaactgcttcaggaacattcgtaagagaaaacattcgcggcactaaagattcgacgaaggacgtccctgaaacgccagcacaagataaccccgcacaggaaaaaggcgtttctgtacaatacaaagcaggggatgggcgtgtgaacagcaatcaaatccgcccgcagcttcacataaaaaataacggcaatgcgacggttgatttaaaagatgtcactgcccgttactggtataacgtgaaaaacaaaggccaaaactttgactgtgactacgcgcagatgggatgcggcaatctgacccacaagtttgtgacgctgcataaacctaagcaaggtgcagatacctatctggaactggggtttaaaacaggaacgctgtcaccgggagcaagcacagggaatattcagcttcgtcttcacaatgatgactggagcaattatgcacaaagcggcgattattcctttttccaatcaaatacgtttaaaacaacgaaaaaaatcacattatatcatcaaggaaaactgatttggggaacagaacccaattagttaagctttaggcggacatcagcaacgatgtccgcttttgtcatcttaaacagcaatacaaggaggtttacgtagcggatgaaactctgaaacagtatttgggcctgtacaaatgttgttagcaatctcaagaaagccaaggagtagctatgattcactgaacatatgatgtaatcgtttcacagttttgaaaagcgtttatagcgcaatgtgtgtatttcacatccgccacttttattacgtaagggggaacaagagaatgaaaaagtatgacgcatttccagagccaattggcggctatactgtcggccgaacccagatggattttgagtacacggcatcagatcatacaaaaagagaactgacggcgtttgtgtactatccgtccgacagcagcgaagggaagactacatcagcgtacatgtttcctgaagtctgcgaaatgcttgatgagcagccgcttctcactgcgttgaaggatgcttactctatagatatcaagacccaatgttacgacgaccttgctctctccgggaaggaaaaacgctatccggtgttattctatgtttgcggcgggggcggttctccagaatggggtacagtgatctgtacagacttggcaagcatgggatatgttgtagtaagcatcggccatcaaaatagcacgatgtataagcgtaaagatgggcgcctgtttaatgtatcaaaggatttttcggatgtcattatggcgttttctgaagatccggagatgctggctttggctggtaagatggagatacggcccgacgatgaaactgccattgagatgtgccaaaacgtgcttacactgccgatacttgacaagttaacagagtatagtgaattacaggcagaagatgtaaggtatgtagccgattatcttgtcaaattggattctggagagctgaattccatctttaagggcagattgttgcttgatatcggcatgggcatagtcggacattcttatggagggcctacgacggcgattgtttgccgggacgacgaacggttcgcctgcgggattggcttggatagcggagcgttcggccttcagggcagcgacattaagaaaccctttttgctgctgttttctgaaccgaactataacatgaatgcgatcattggcgctaacaatagcatggatacctattatttctctgttgatcgtgctgcgcatttagattactgcgacatcgtgtttaccagtgtgaataaggaacttagaggcgaacgggatgccatggagatgcgaaatcttgttacagactatacgaagaacttttttgatcattacatactgcagaaggctgcaagtatggaaagtctggcatacgatggcgtggacttgattaagaagaccagcaacaagtgacataaccgattaaaatactcaaactgaaaaacctttatgaccaatttaatttattaaggacgtagaggttttttaatattaccttacaaaaaggggatgttcttagaatatggatccacttttatattctctacataatttctagtttacataatatatattctaggaagtaaaatcttcaatgaaaattctgtctcgttatcttaagtatacttagttggtgagacagaattaaaaaaatcagatgtattacgatttataattaaccttgaacataacaccatctttaataatcacctcgcactttacttcgtctacatcagttttgccattggataatcttgtgtacacataaacccaattttcaccgtctcttttgaagtaatcaaaatcgtaagcattcggatatttatctcttacccaaattaatcctggcagagtctccgccattgctggtgatccagatactagcaaggacccaccagtgctgtagctcctgctatcttcttgaatttactttttaacatttttattgcccccttttgatttgttgcctgctgcttactcacttagcaggcaatctgattttatcaccttgcaagagggaaatttgtcatattttgtagataagagtattactttcggaaaaaatacaaaattatgtcaattattttccattcttgaattctgaaacttttcggagggcttctgatagcgatcctctttgcaaatgtgcttacataaaaaaaaccggcgtgttggccggtcctttcttctagacaacatgtacccttcttgattactcgtgaggaagcattaaagcctttattaagcctcgtaatttctgctgtttgaacctaaattcctaaagagtaaagaagaaagcagagctaacacaaaataaacaacaacgaatccaccccaaaagaagatagcctgatcaaatgggaagccaaacactctaaaaattattctgtgtaccactccggcaataatgaccaggatgcttgctgataacgcaaaagtaatgtgtttcaatttaaacctctccttatgaaagattaataactctgtcagacccattggcgatttcttgatcgtgagtaacacaaataattgttttccccatatcttttaactgatggaataaagacaagataatgtttttgttatattcgtctaagtttcctgtcggttcatcagccaggataatatcacaaggcttcaaaataattcttgcaatggccacacgttgttgctctccgccactcagttgataaacctttttctttaaaaagcttttatccagaccaaccatttctaaagcttctgtcaacttttctttcttaaagtcttttgcataagccgtcgaaagcagtaagtttgttaatactgtttcattgtccataagcacgtaattttgaaagatataccctaagttctctctccgcagtttcatcacgtcgttagatttaggatttcgaaaacctaaaatttcaatatctcctgagtgtggagtatcaagaaggcctattatatttagaagggttgtcttccctgaaccgctcttaccaacaattgaaacaaattcattttcttttatctgaagagagaaattcgacagaacaggtttttcattaaacgtctttgatatgttgttgagtgtaatcatattctatctccttttaagatcttatgcatgtttttcttgtttaaatagacactcaggaaataaagaataagcagctcgattacaataaacagcccaacaaaaattgttaattcaaagattctataatatatactgatacctaaaccaataaggcaattggatagaagagaaaagatgattaaatttttatttctggcccaatatgaatatccaaaaagctctttaaggtacagccgatatgcattcgcgctgtaatacgaccaaatataagcaacaagaaaggcgatggagaggataactgttattgttagtccaattaaattctgcaagaattgattctgaattcttgctataccgtcgcttagttcttgataaaccgaaattgatgaatcaattagatctctcgtattggtcttctccaaataaggaactatgcggtcatacgccatgccttttgaagaatctgaaaagaataaacttgaggttgagtaagcacctataacagatggatcaacgttgtccgtgaaaattgcagctattggatcaacaatgttatttttattgccggcatccccaaactcactattaaaggtgaaatactcctgcctatttttagtataaatgatgttgattttcaattcatcttttttaagggtgtttaaaggttgattcatctccttgttatacatattatctaattcaactttgtcaaagaaaaactgatccctgtatgtagctattattttttctttaaattttcatacttttgtggaacaagcaggttcaatgtatttgaatcaacccttaattgcttttggcttatggcttccccattagcgccgataatgggattcacctttaaataattagggctgattgtaatacttcgtccagaaggagagtaaatttcatttttctttgtcgtatttaaggtgtaaaaataaacaggtttttttccgtctttccttagtacagcatagttatgtgcatcaatgacgaacgcatttttatgcttctctaattgatgatacaacgcgcgaactctaacatttttctccctgtctaattttaaatcactatagtctatcccggtatttgcaaagcttgtcttataagtgttttgtgtctttttccagtacgattgattatcaagctgctgtttgagatcgaatacgttagaaagtgaaaacgcaacaatattgaagagcaatatcgtgacaacaattttaaagcctacagataaccattggaattttttaatcggtgtgctgcctttgatcgagccactaatgtcgctgttgttatacaagacgagggtaaccatgatggtgtataccatcatgataagcgcaccaatcaccgcgtttctaatataaattctaagatatgcagccagccagtcatttaaattgaaagaaaaagctagtaaagctacaataattgcaccgcaaaatatgattataattagaggcttcaaaaacattgctgggtaagaaagcagtgttttaactttggaatacccccataacttttgcagcagaagccgtttgcgatttttaattacaaaataaaggacaccaataaacaaaatcagcatagaaagcaacactagcataagcaaagttttgttaaacataaaagcagtattctcagtgatgttttcaaaacttacttcaccatagtcagcaaaaaaggttttgtgctttctccaataccttgtcatcgttagatgaaatataaaatttgcttcctatgcctatattctttatttggttaaaatcaaaatatctgattttccatgtcgagagtggaaaagaaatgctgccgatcatcttctgatttgaatgatctcttagaaaatttgacacaagcttattgccgttatatattgatggttcatttttaggatttgtagaatagatgtttaagctcttctcatctaagaaattgtattgagaaatgttcactttgttttctttggagaaggcgaccaatctctttacaaagtcctcacttttaaattctgaagtataattgattatcaatgcttctttatttgagaataaagtgtaatagatttgtttgttaagagtgtaatgatagcttgacatattcattgagagcaaaaccagaatgaacaatatgtagattgttttcttcattggacagcctccataaaaagaaatccggtgctgtcttgtattcaagtttgaccacaccggaagaaaaatttaaaaatcactttgctatcgttttctttattttgtatcccaaaaagccttgtttccaaaaagggtttgatacacggaagcgtaggtatacccttcatcttttttcttccattcggttacctgcggaagcatgagtgatccgataatgcacagttaaaaatttcagtccgaacagccacatatgatgaacggccttcaggcttgtttcgctctgggctgaaataagaaatgtctctgccagcggaagatgacacgtcccccatttcgtctgcagataaatcccttcatcacccgctccgctttttcgccgtctgcttgtcaaaagaagattctgcttacgcgcataaggctttaaaatgcccgtcatttggccgtacggcagcggaagagagatattcatgtatccttccccttttgccctgtacgctgaatacagcgcagtaaaaacggtttcctgcttttcatttgttctgatccacgcacggacattttttctgccgtctttatcagagtcaactcctataatatcactgtgcatgatataccaatccggattcatggacaggtgaatctgccccgctcttctgctgaacggctcgtacacgcgcgcgaacggacgaaaccatccgctccacgtcacttttgccatgatgtcataatcaattgttttttcataaaaggaaataacggccggcgccagttttttagttgaaaagtcttcagaatgcagttctctcatctgatccagaaggccggtataatggatgtcatttgctgcatgaatatcagtcaaaaagtctttgcctatcgttctcttcccgtaaatacggctgaacgttctttcgctgccctcatcaaacggtctcggattttccaacctccaccccgccaaagccggcaggataacgccgaatgcattgacggccccgtgaatccaaatcatctggctgatcgtgagcgttgcctcctcgcggtagacaccgtacgaatatatcaaagaaaaagcaattgtgatcattaacacagccgaagaactcctgatcaagatcctgcctgttttcgtaacaaacggcgccgtaaagacgagatatgcatttacatacagacccgccagatacagagcgacagcaatcacatcaagtgtctttgaaaatgtaatccccaaggcaataaggatcggcgaaatcaaaataatgaccgtgctccatctgtaaagaacccgtttctcccgtatgatcctgccgagcaatccgttaaagatcggaatgagaaaagcggaatagtgaaagtgcaccgccgtcagcagaacgataagcgggccgaaattcatgacgggaatctcaaggacatatgcgaagaaccagaatccgcccccggccaaataaatgaaacccgccataacagacatctcttctgttctgtgaatatttgttttcatcagccgccggacagcatacagtgccagcccaaccgtataaatgagccacacaacggcaaaaaaactgaagtctgtgacaagcgcaagcaccgcacataaagcggcaacaggataactccgtaataacacattctctaaggtctttgacggtcgaaaagcaaaatcgaatacagcgggaacgaaaaaaagtacggaaaataaaacaaacatctcagcagctgatatatacggagcttcagccgccgcaaatcccaaaaagcaaatcacgcttaccatgagatgacgcttcagcatgtttctccctctgtttcccggaaagtcccccggtaagagaaaagcgtgccgagtatccggttttttacatgaacctttatgctgaagcaattcatttcctcatcataagcctcataaacggttgaactgccgcacagccatgccggaagcgggattttctttccgactatcaggagccactgccttccggatgtaataacaagccctccgtctgaagacgcttctaaatgcagttcagacagtaggatgcggggtttgccgaagtaatcaagaattctgttttcccgctcatcatactccatgaccgcatcaaaaaaacgcggtttgcttttaaagaaaaaggtacgattccattccacgccattttgcctgtttttgttttcgatagtgaaagggatatcgtttcccctctctgagaaaaaacatctgaaaaaaacacctgtctttaaaagcattctgacaagaaaagaacctccctttatttctgacataacgccttctccgcaaaacgtgcgtgatccgtcaaatctgtaccgtttctgcagcatcgggtgcagtgattgataatgagtaatcgctttttcatacattgaatccgtcatttcacttctctctttcgttttgtatgccaggcgctcggcagcttgagcttaagaatcattgcggctatcgtaagcattcctaatgagatcacgaatccgccgcccgaatatagcagtgccgttacacaaaagaagactgactgcccggtgtgaatcagccactttctccgcatgggaagcagccataatacccctaaccctgtctccagcgctcccctcacgatctctgcatcggcacagccatcatgaaagccttgaaaaaaccaatacagactgaatacgagacacataaagacatagacaaacccgaaacggactgatatcttcggatgtctgttttgttctatccaaagccgcaacgcatcaaagctccatgcggtagcccagcttagcagaggacgaaataaaaaccggtctatccaacttcccggcagaccgcgggccgtttcatattgatattgagtcaaaaatgcggtttgtccgttatcccgctctatatacttccagtagcccctgccttcttttataagtgacagcggatgatcagaggcaaaagcgagcgaagacactctttctgacgagcgagaccttatgtcacctattgattcgcccgtgccggataccttcagcccaaaaccgattcgtgtttcatatagaaatctctgcggttcatctggcagcctatgaagatatgtaatgtcagaaaaacgcagatcccattctttatgaagatgcgggttttgcgtatattcccaaagcgtttctatatcagatgcaatattgatttcgacatatatcggcttctgtttcatgccccctcctcttcccttcttttgtaaacaattcctatattatcataggaacagatcaagcggcagaacgaaaaggccatcccgttatcggcaggacagcctcagtggctttgatgacttatgaataaggtatcgtgtcttttttatcttcagaagcggtttgaatgataatcgggcgcacaaaacggattaccgcagccgaggccaaagcggctaatccgcctgcaagcaaaaacgccccggagaatgatccgcttttgtccgcgataaagccggttaaagcaggcccgataataccggccgtgtttgcaagaaaatgcataaagccgccgactgatccgacattcctttgatcaaccacatcatgaatcaccgcccaatagatagagcccgttatatataaaaagaagactgataaagcaacgagaataacggcacttacggtagtggtaacaagtccggcaaatccgatcagtacagcggaagcgaacaaacaagtgacaagaatgactttccgtgagaacaaaaccccttttccggcggtttttttgaatacataatcagaaatcattccgcctgccgccaaaccgataaatccaagaatccagggaataacagtcaccacgctcataaattcaacacttaaaccgcgttctttcaccagatagctcggaaaccatgttaagaagaaaaataagatgtaattgtaggcgaaaaaggcaaaagctgtgaagagaaccgttttttgtttcaaataaaaggtcatcgggatatgctgctcatgcggttgaatctccgctttcattgccggggcgtcttccgtcggcgccggccgttctttgacaaatttaaaccagatgaccgcccagactaaaccgatgatcatgatcaggacaaaggaaactttccagctgaacgccacagcaatcatcccgacaatcgggccggaaatcgccccgccgagcggcgttccgctgtttgtcaggccgatgaccgtggcgcgctgagacggaggaaaccaattgttgaccattttgcttatggcagccgacagcggcccctctcccataccgaataaaacacggataatcaaaagacttacaaatccgaaagcaagcgcaaccgctccgctgaaaagagaccaaacgatcatcgccgtacacaatgtcaatttagccccgtaccggtcagatgcaacaccgccgagaaagttaaacacagcgtatccgacagaaaaactgctgaaaatcagccccatttgggttgccgacaatgtgagatcctgctgtatgaacggcgctgcaatagacagcgctgagcggtctaaatagttaatcaccccggctgaaaataaaagaagaagaatagggaatctatcttttgagaacataaaaaaatccccctctcatttcgcaatattcagacatttaaattgccggagtaaaccggtttatgcaatgaaaccggttatccggattgccttgcgagcaacgccggtttatagcggtaaatccgtttttcaccgccatctttttcttgtatctggcgaagaagaaggcttcccgcttttcgtgccatttctgccgcaggctggacgatcgtcgtaattggaggagtaaaaaaacccgcaaaaggaacttcatcaattccgatgacggctgccttatccggaattgtcatatcatgctccttcatatacttcagcacctcaacaagaacgatatcgtttgccgccaatatcgctttcggaggctcctcaagtgagaacagctctgacaaaacattggaaatatcagctgcatcggctgttttgatatattcgtcccgcaccatcattccgtggcggtcaagcgccttcttatacccttcaatcctttctaccctcggactgatttcccgaataatagacgtcgtaataatcgcaattctcttaatgccgctttcgataaaccggtcaacggcaagaccggctgcatgatggttatcaagcatcactgtcggaatcccgagttcttcaatggttctgtccataaacacgaccggaaacgtatcacgtttcatcttttcatataaagagagattttcgcccgtcggaaaaataataattccgtccacctgcttagcccgcagcatttcaatatatttcttttctttttccggttcatcatccgcattgcagacaataatatgaaatccttgttcatgaaaatagtcttccaccgccctgatgacctgagtggaaaaagtgtgaagaatattagccaccaccacacctactgtaaatgttgatttctgttttaagctgcgggcgacgaaattcggctgatagttcagctcttgaatggccgcttctattttttgtttcgttttctcgctcatatagtcatagcgctgatttaaaaattgagatacggtgcttttagatacgtttgcatatttcgccacatcagaaattgtaatggttttcatagactcatccccgtctgtcttcatttttcactagtataagtcagaagtaaatggtttacaatctgacagggacatggattctgtcacactccggaataagccataaaacctccgtcgacgggaacggtgaccccggtgacgaagcctgagcatgaatcatccgaaaaccacaggagcgttcccagaaggtcttccggtttcccgaaacgtttcatcggtgtatgtgccataatcttattggatcggtctgtcagacttccatcttcctgtaataacaacccacggttttgcgctgtcaaaaagaaacccggagcgatggcattcacccgcagccctttttttgcgaaatgaacagccatccacatcgtaaaattctgaatcgccgccttggccgcgctgtaggcgggcacctttgtcatcggtgtatacgcactcatagaagaaatattaataatcgcgggacattccgccttcaaaaggtcttttccaaacacttgcgatgccagaaatgcaccggtaaagttggttgaaaatacgctggaaaaccccgtttcgtccatatcaaaaaatgatgtgccctgctcatcctcttcatacgtctcgctggcagtgatcgcatcagggtggtttcccccggctccgttaattaaaagattgacagaaccgaaccggctgataatctcgtcttttgccttttcgagcgaatcacgggctgaaacatcagccggtacagaaatcgcggttcctccagcgtcagcaatctcgcccgccgcacgctctgctttatcagcattccggctgacgatcgcaattttcatcccctgccgtgaaagctcctttgccattgctgaacagagaacaccgctcccgcctgttatgacagcggttcttcctgataaacgttcatgaatcggtctcatcccttcacctctttctcatgagacgagaacgcatcccacagtccgttcaagtacataattcctaaggcacgatcatataaaccataacccggccggcattgttcgccccagatatgacggccgtgatcaggccgtacatatcctttatagccttggccgtgcaattcttttaccacaccggtaatatcaatggacccatcactggtaagatgcgaagtttccgtaaaatcaccgttatcgcagattttcacatttcgtatatgggcaaacggcgcagctcccgcatagtgtttggcgatcttcaccatatcattggcgggattcgctcccatcgaacccgtgcacaacgtaatacaattggcgggtgaatctgaaatctctcgcagcttttcataacttttctcaccggtaataatacggggcaggccaaaaattgaccagggcggatcatccggatgaatggccatttgaatgccgtgttcctccgctacaggaaggatttcatgtaaaaagaactcaagattggcccaaagctgtttttcatcaaccgtttgataggcctcaaacagttccttgatccgggccattttctccggctcccacccgggaagcgtcaaatcagaagattcttcaaccgtgcggatgagttcctccggagggagactttccactttcgctttttcaaaaaacaaagcggttgacccatcctccagcgcgcggaacatatcggtacgcgtccagtcaaatatcggcatgaaattgtaacagatgactttcacgccgaattcggacagattgcgaatggtctgtttatagtgctcaatatattgtccgcgttcttcatgaccgagtttaatggcttcatgaacattcacgctttccacgatctctgcatgaaacccataggattgaatgtttctgacttccgcttcaatgtcctccttttcccatacttcgcccgcgggcttctggtgaagagcccagacgatgcctttgaccccgggaatttgtctgacatgttcaagagtcaccgtatcattaccttggccgtaccagcgaaacgtgatattcatgttacacccccgtatattcgttttttcggcagacgtattctttgctgagggatacggcagcttcatagccgcccttttgatatgcttttgtcaagtcgcttcccacaccgaccgcgaccgctccggcagagagccagtcattcatgctgtttaatgagatacccccggtcggcataatgcggacattcggcagaggaccgttgaccgacttgataaatgaagggtcaaacgaattagcggggaacagctttaccacatcacatccggcttcaagggccaaagccatatcagacacactcatgcatcccggaagatacggtacgctgtactggttgcatagagatgctatctcttttacaaaatgagagctgacgataaatgaggcgcctgataaaatggcgtgtctcgccgtttctgtatccattacagaaccggctccaagaagaatatcttgatgccggagttccttaaagacatcttccacttcaggagttgtgtatgtaagctcaatggcgctgatacctcctgaaatggccgcttttgaaacttcaagcgcctcttggctgttttgtccccttatgacagccaccacttgtgcatgcagaagtttttcgtaaatggcgtacttaggcagcattctcgctcctcctttaatcaaacgtaatgattgcttttcccaccttgtccgggtgctgttcgatcaactgaaatgcttgatggacgtcatctgctgaaaatgtatgtgtaataagaccgccgtgcgttaacaggcctttattcagtaagtctgtaatgtacggaaactgattcgtctgcaatcttgaaccggttatcgtgacttccttttttgtgatcggaagctgagaaatgccggcagtcctctcatcaaaaccaagcacaaccacatgaccggccggagacaccgcgtcaatggacgtttcaaacgttgaggggagacagacggcatcaatgacgacattggcgccttctttttttgtccattcgttcacccgcaaaacgggatcttctttttgcgcgttgacggtaacgtccgcaccgtttttttcagcgaatgccaagcgttcatcattcaagtcggttatcatgacagtagcgcctttgaactttgccatttttaatatgcagattccgatcggtcccgctccctgaatcaaaacggtatcttccttctcgacacggcctctccaaacggcctgggcgccgatcgtatatggttctgccatgaccgcttcctcccaggccagatcgggggaaacggcatgcagctgcttttccggaaccacgatatattcccgcatcccgccatcttcatgaacgccgaacaccgaaagcgctttgcagacgttcggacgtcctttccggcaggcatagcatgttccgcaataagatatcggttcaaccactacgcggtcacccggcttgaaacgccggacatgagaaccggtatttgcgacttcccctgtaacttcatgtccgattactctcggcagggacgctaacggatttgtcccatgataaatatgcaaatctgatccgcaaattccgacccgcttcaccttgacaagaacatcatccgcgtggacaacagacggtttctcacattccgtcaccaccagatcaaatgctttccgtactagaaccgctttcattttctcacccgctttttaagttgtgcttgctaccgttcaatcacagtctctttgtttacaaatgacagaacctcttctagatagggaagcccttcattgtcaccggaaactgtggtgacgagcgcaccgaccgcattggcaaactccagacgtttttccggttcaaaaccatgcagataactgtacaggtagccggcattaaagccgtcacccgctcctaccgtgtcaacaggcgcaaccgggaaagcctctttgtgaatccacttatgatcatgatacagcgcagaacctgcttcaccgtcttttatgacaagctgactgattgaataggtctctgcaaaccgggctaatgcttcattttcccctatacctgtcagctgtttcatttcgtcccggcccgccagaagaatatcagtatgcggaaagatttgatgaaatgccgcacgcgcctcctcgatcgtccacagcttcagcctgatattcggatcaaaagatacgggaatccctcttgctttggcgatggaaagcaccctttcagcaatttcaagatttttcttatcaagcgcgaggaacacaccggtaagatgaacaatgtgaatgccggcaaacatattctctgttatatcttccggtgcaagagtcagaattggtgaattgaaacgataataaaacgtcttgcctgaaccgtcatttctgatctctttgacatttaaagatgtaggaaagccttcaacataggagacgtcagtcacatcaattccttctcctttggcaaactgataaatcactctgccgaactcatccttccccagtctgctgacccactttgagtgcagattcaatctggcgcatgcaatcgcaaaattcagttcagctcctcctgcttttcgttcaaaatgggtaacaaaacgcaaaggtcctgtgcttgcgggatttaaggtgatcatcgcatcaccgatcgtaaaaatgccataatcagaagccacatcaatactcctttcttttaagactaaatcggtttggtaaaccggtttagtaaaactttatatgaaaacccttacacacgcaagagaaaaatacaataaattcaaaaaactgttttcggtaaaaataacccggtttttcacatgaaaaaaccctcacaacaaaatgtaaggggtttttgaaaattgtatgcatgtttccttagttagcagtcttacgttcggggcttgtaccttcttcttccgcccatgtttcaatatgcttgagctccggggtattctcggctttgaatacgggatcaagaccttttttgcgctgagcggcataatccttatagatcttgtaggctacattactcagcagtaaaattgccactaagttaatgagagccaagagtcccataaacaagtttgccatgtcccagacgatctggaagtcagccaaacatccgtataccaccatcactacgacgaatacgcggtaaatattaagccatgttttgcttgttttaataaattcaatattcgtttcaccatagtaatagttgccgaccacagagctgaatgcgaataaaaacatcgcaatcgcaataaatgtcggggcccagccgccgaggtggtgctgcaatgcggcttgtgtcacttggatgccgtcgcctttaggcgtaaagctgtacaataaaatgataaaggcagtcgatgtacaaacaataaatgtatcaaaaaacacgccgagcgtctgaattaatccctgcttagccggatgcgacacatgtgcagccgctgcggcattcggcgcgcttcccatacccgcttcgtttgaaaacaggccgcgctgcgcaccgataataatgatgcttcctaagcttccgccgacgatctgttcaagaccgaacgcatttttcacaatcgtaacaaacagctcaggtaccgctgtaatatttacaatcacgacatacagcgcgatcagaatatacatgcccgccatgaccggaacgattaattgcgaaacggaaacaacacgtttcagaccgccgaatataatgaaagccgttaatacagctaaaatgattgcgataactgttttattcacatggaatgcttcgtcaaacgccacagaaatcgtatttgactgcacggcgttaaagataagtccgaaagaaacggtaatcaatacggcgaataaaataccgagccagcgggcgcccagtcccttagccatgtaatatgccggaccgccgcggaattcgtcaccggaacgcactttatacagctgcgccaaggtgctttccacaaagctggaagccataccgacaatcgctacgatccacatccaaaatactgcgccgggaccgcctgttgcaatcgccagcgcgacgccggtcaagtttccggttccgacacgagaagcggctgagataaagaatgcctgcattgaagacactcctttattcccttgcggcttctccccgacgattctgaacatttcaataaagtattggaattgaataaagcgaaaacggaacgtaaagtacaatccgatcccgactaaaatataaacaagatacttccaaataaaatcatttggaacatttatgatttcactgatgaaagcctccatgtttaacctcccttttacatatcttttactgtcatttttgctgcatatgttagatcttttaacacaacgagtattattatatcacaacaacagtggttgagaagtttttttaagaaaatgtttcggtttcttcatcacgtcttttgctgtcatgccccgttttttatcttacagcctgaaaaatgttgtcacgtcataaggaatgcgtgcatatcataacaaataggtctttaagaaaaaagagatgaaaagatggatggaatggtatatacttaaccaggataataattttttaaatttaataaatatgtttactttacatttaaattagggtattataataaaaatattcagacttatgaaggggggagaacatttgaaaaaaatcttgtttttaaaagcttctattttatttttagcgattgcaagctttcatttgctctccattccccatgcgtttgatactgctcatcattttaaagcggtagccgaccagcaggaaatgcacgaaatgaaggccggccaaaatgctgatgatgagaaaaaatcgctgacgggctcatatatcttgacggcgctttttgccgcttctgtctcactgatcgtgatatcagacaggagacgccccgcttcccggagaagacagcgaaagaaaagctttttaatcgctaaattttatcagtcctcgtatttcgatgagcttcatgttcaacatcgcctatctatgtaacataaaatgaggaggttgttaaacatgttgtttatcttacgaatggtgattttagggttgttttcattcactgcattgaatttatttgtatggcagggaatcgaagtcattcacgctatcactgacttattcggcagccatgaaagctaaatagtaaaacctccgctcaatgagcggaggtttttttattttatttttactcttaaacatcagacgcggggatacgccatacatctgttaccggccctgtctcatcttcatcggtaaagaaggagccgttgctgtatcggtcattcgcccgcaaggacttcacggcgatttcaattctctcgcctttttctgtttccgcagcgatcatgtcggctaaagcgcacgcgaatacgccgactgcgcgatgcgggttctttttaagctcacgcagcatgatgacaccgcgcttcgccctggatgttttttcgaattcagataggttcatccgcttgattgctccccgctgtgtgacaaggacaagcgaatctgtctcatgcaggatttgtcctgatacgacggtatcaccgtcttttacatttatgccctttacgccggccgcacgggcaccgactacatttacttcatcttcaccgaaccataaaccgtacccgaggcgggtggcgataaacagctggctgccgccgtctgtgacatgaacatcaatcagctcgtcgtcccctttaaggttaagggcaacaagcgctttcgagtaacgctgcgctttgtaatgcgtcatttcagttctcttcaccatgccgtttttcgtcataaacaataaatatgaagatggatcaaattcttttaccggtatagctttcacgatggtttcatcacggtcaatcgtgatgatgttcgttacgtgctgccccatgtctttccacctgatatcgggaagctggtgaaccggacaataaacatagcttcccttattggtaaagagcaggagaacatccgttgtattcatttcaaattggtgaatcagcctgtcagtatccttcataccgaaatcctggccgttagaagcggcaaatgaccgctgacttgttcgttttacatagccgtcttttgtgactgtcacatatacgtcctcagaggctaccatgacttcaagattgattttaatttcctcaatcttttcttcaatgacagaccgtctgctgtcagcataggtctttttcaattttttcaggctgcttgtaatgacttttaacagctttttatcatgacttaaaatggcttcgagctcctgaattttcttgctgagctcttccgcttcctcttttagcgccgtaatatccgtgtttgtcagacgatacagctgcaaggatacgatcgcttcggcctgcggctccgtaaatgtgaatttagacattacgttttgtttcgcatctttcttgtcgctgcttgcccggatgacggctatgacctcatctaacacagacagtgccttcatcagtccttcaacgatgtggtgccgctcttttgctttttgcaattcaaagacggagcggtttgtcaccacttccttctggtgggaaatatacgcatccaggatggccgtaagactcatcagcatcggccggcggttatgtatggcgaccatattaaagttataagttgtctgcagatcagtgtttttatataagaaattcaaaatgccttttgcatcggcttctttctttaactcaacgaccacccgaagccccgtgcggtcagtttcatcccggacttcagaaatgccttcgacttttttgtctatgcggtattcatccattttctttacgagattggctttgtttacttcaaacggaatttctgtaatgacgatctgctcccgtccgcctcttacggattccacttcagccttgccgcggataataattttgcctttcccggtttcataagccttccgaatgccgtcgactccttgaataatgcctcctgtcggaaagtcaggccctttaatcacctgcatcaagtcatcgacggtgcaatccggagattcaatccgtttaatgacggcatcaatgacctcacccagatgatgagggggaatatcagtcgcatagcccgctgaaatcccggttgatccgttgacaagcaagttagggaacatggcgggcaaaacaaccggttctttactagtgtcatcaaagttcggaacgaattcaaccgtatttttatcaatgtcacgcaaaagctctgatgcgatagaagataatctcgcttccgtataacgcatggcagccggcggatcaccgtcaatgcttccattgttgccgtgcatctcaatcaggacattccgcactttccaatcctggctcatccgcaccatcgcttcataaacggagctgtcaccgtgcggatgataattaccgataacgtttccgaccgttttcgccgctttacggaaatttttatcgaaagtatttccgtctgcgtgcatggcgtataaaattctccgctgcaccggctttaaaccgtcacgagcatcaggcagcgccctgtcttgaataatgtatttactatagcgtccgaaacggtcgccgattacttcttctaacggtaaatcatgaaataattctggctgtgccactattaaacctcctcagcgaccgacaagttttcattttctaaaatattgctttcctcatctaatccgaaggcaacatttttttcaatccattttcttctcggttctactttgtctcccattaatgtcgttacacggcgctctacccgtgccgcatcgtcgatcttgactctgacgagcgttcgcgattcgggattcatcgtcgtttcccagagctggtctgcgttcatttctcccagacctttatagcgctggatggtataccctttgccgactttctttaaaacgccgtccatttcttcgtcggaccaagcatattcaataatctctttcttaccgcttcctttgctcactttgtaaagaggcggaagggcgatgaagacttttccgtgctcgattaaaggtttcatatagcggtagaaaaacgttaacagcaagacttgaatgtgcgcgccgtcggtatccgcgtccgtcatgatgatgatcttgtcataattgatgtcgtctatctcaaaatctgcgccgacaccgcctccgatcgcatgaataatcgtattgatttcttcatttttgaagatgtctgcaagctttgctttctctgtgttgatgacctttccgcgaaggggcagcacggcttggaatttccggtctcttccctgttttgcagaacctcccgcagagtctccctccacaagatacaattcattcttcgccggatttctggaaccggccggtgtgagttttccgctcagcgtcgcttctgattttttgcgttttttgccgcttctcgcttcttctctcgctttacgggccgcttcacgggcctggcttgctttaatcgcttttttgacaagcagggttgctgtatcgcggttttcttccaggaaataagcaagattctcggaaatgacggcatccgcggcggatctcgcctcacttgttccaagcttccctttcgtctggccttcaaattgcagcagttcctccgggatacgcacggaaatgattgcggacaaaccttccctgatatcggcgccttcaaggttcttgtctttctcttttaaaagggctacctttcgcgcatactcgttaaacgctcttgtcattgccgttttggctcctgattcgtgggtgccgccgtcctttgttctgacgttattaacgaatgacagcatattttctgaatacccgtcattaaactgaaacgcgaaatcgacttcaatgtcatgatgctcgccttcaaaggaaaccacttcgcataaagcgtctttttcctcgtttagataagcgacaaatgcttcaattccgttctcataataaaatacttcttttacgccgttccgttcatcaattaattctattttcaagccttttaacaagaaagccgattcgcgcagacgttctgacagcgtgtcaaaattataaaccgttgcgctgaacattgacggatcaggtttaaaatgggtaagcgttcccgtttttttggtcgttccgattttttcaagtgaagtcacgggcttgccgccgttttcaaaccgctgtttataaacatatccgtcacgctcaatagtaactgtcagccactccgataatgcgtttacgacagatgcgccgacaccatgcagaccgccgcttgttttatagccgccctgtccgaatttccccccggcatgcagcacggtgaaaataacttccggcgtcggctttccgagcttatgcatcccggtcggcattccgcgtcctctgtcttgtacggagatgctgttgtccttatgtatcgttacgataatatgatctccgtagccggcaagaacttcatcgacggaattgtcgacgatctcatataccagatggtgcaggccgcgtgcgtccgtcgaaccaatgtacattcccggtcgttttctgacggcttccaggccttcaagcacctgtatggcatcttcgttgtaatcaaattgctgttttctagccaaacgtacaaacccctttcaaaaaacctgctcttaatcattctcttttttaaatgttttcatgtctttgtttttcagtatgcgcaagcttcggtccaattctcctcggactcacaattataaccaatatgcttgatttcgcaacatatttaagcgaatggctcgttttttaggccgcaagacatacattcgaacggcttttcatctttttggtgccctttttggcgaataagaacatgagttcgctttctattatatagctttatgcgggccatcgcaaacagactgtaaacccctgtataaaggggtttctaaaaaagctgttcatgctttattgtatctgtttcatcatcatacgcaaagagtattctttcaataaaaaagcaaaaacccctgatttgccaaggatttttgccttttttgttcctattttataacagcgcgggcgacttttatacataaatccataacagccgtccgtcctttgtctgtaatcatgcgatacgcttcttcatttgcaaggccctgctgcgcccaaaaaacgggagcgtccgtctgtaaaaattcttcagcgacgccgggaagctgctcagagcgtctgaacacattcacgatatcaatcggtccctccacgtcttttaatgaagcgacggctttaacgccaagcgcctcatcaatcgttggattgacgggaataatttcatacccttcattctgcatcgctttggaaaccatgtaagaagtccggtcgggacggtctgacagcccgacgactgcgatccgtttgctccggtccagaatttctttaatctctgattttgaaggattttgcatctttaccatctccttttgatatattgtacatgaccgcttcgccggaatcaaaaaaagcgctttgtcagcttaattctcaaaaaacttgtcatcagacggtaacaactcgtgttaaaatagagtgaagggacattgaaaaggagaaatgtagatgttgattgctttattgattattttggcctatgtaataggcagcatcccgtcaggtttaatcgtaggcaaacttgcgaaagggatcgatattagagaacacggaagcggcaatttgggcgctacaaatgcttttcgcacgcttggcgttaaagcgggatctgttgtcatcgcagccgatattttaaaaggcaccttggccgcggcgctcccatatttactgcacgtccccattcatcctcttctcgcaggggtggcagcagtaatcggccatgtattccccgtgttcgcaaagtttaagggaggcaaagccgtagccacatcagggggcgtcctgctgttttatgctccgctgttattcgttacgatggttgtagtatttttcgtatttttattccttacgaaatttgtttctctgtcttcaatgttaacagggatttatacgattatttactgtctgtttgtaaaagacccttatttattagtcgtagtgacgctcttgaccgcgtttgttatctacagacacagggcaaacatcaaacggattataaacaaaacagaaccgaagatcaaatggttttgatgaaacttcaattttgacatcaaaatgccatatgcgtttataatagagataatttctttatatgagaaacaaaaagggagtgttccggatgaacatgaaagtaacgaaaggcgcgctggattggtacaaagaagagctcgatctggaaacaggcgaccatgtccgtttctttgtccgttacgggggatgcagcaacgttcagaaaggcttttctctcggcattttaaaagaccggccgatgaacatcggcaccagcacggaagttgaaggcattaccttttttattgaagaaagcgacttatggtactttgataatcacgatttgtcagtcacatattcagatcaggcagaagagccggtatttgattacgtgtaagaaaaaaagaacgcagcggatgcgttctttttttacagcctgaaccttttgagatgatcagtcagatgttctttttctaatatgcttctttgcgtatcaccgagcaggtcaaagtggggaaattcatttttatggtgaatccactccggcttcagcccatactcagctccccatctgatcagtttattgagatcgcttgaaccggccttcgtcacggtcttagcctccggaaagcggtcgtccagccagtaatgcgttaaaaaagcgattttcccttccgatacatcccgcttccatctttccagttccttacgcgtaattccaaatgccataactgcagccgctccttatttttttgccttttcgtaagcggcatgccaatcaggaaaagccttgcgaaactgaatcggtttgaagctctctttatcaacgcatatatgagaggatgtcgctttgatggcaagttcttgatccggattatagatgtggtagccgtaaacggttttaaatccgttatattcttcaatccaagtatgtacgacagccgtttctccgtagcggagcggctttttataagaaatgctgatatccaatacaggggacagcactcctctgtcttccatatccttgtaaaggaatccgagttccttaatcagcgccgttctgccgacctccatccagactaagtaattggcatgatagacgatacccatttgatctgtttccgcataacgcacttctatttctttttttgacacatgcaacgttctctgctcccttattatcagattagccccattttatcacaacgagccggaaagagaaaaaaaccaggtttccctggtttttattatgattgatagccgttttctcttgcagccgattcatcctggatttcactgcggaacgattcaatgctttcattgcgtctggcattcttctcttgaatgcgctgtttttcctcatctgtcgcaaattccattgattctttggcttcttctatattttcaattgtattctgcaccatatcctgcagcttttcaacgttatcggaacggtcatccggattcggtttttgataattgtttgtcataatgtctgctctcctttgatgatgttattcgcctttcgtctgcatgacaatcggatgtccgtttgacttgtcatgaaacttttcccctttgttgcgtttatatttaacgggttttgtccctaagtggctcggagcgtattgcggctggccgtctttcttgtttatgcccatgttcatccctccttaagagtatattttgcaaaaggaggtgcaaacatgactgcaaattaaaggttatttttgtttgaaccgctgctccagcttttcttcaagctgattcaaatattccgtattggtcatcagctcacgtttattttccataaccaattcatgaaaagaacgttttcgcatttttttcaatcttctcacctccgtgttttcattcattttttccaatttttcaaaacctaagcccttcacaataaaaaaactgaacctctatttgagatccagtttttctttcatttctttttttgtcatcgtgcctacgcgaatatgctgaatggttcctttttcgtctaatatgtatgttgtcggataagaaagcacgttgaaatctccgttaattccgcttttgtcaatcagaataggaaaggtcagctgataatgatcagcaaatgatttcacagcctgtatatttttttcagaggatgtaaaattaacggctgctaccgcaatatcaggatattctttctgcagctcctgcatatcgggcatttccattcggcacggcttacaccacgtcgcccagaaattgaggagcactttttttcctttataatcagaaagggagatactttttcctgacaatgtatcaagtgtaaagtcaggggctttcatcccttcttctgtcccttctttcggacttttttgtacagaataaatgttccagcccgcatacactaacaacccgataagtaacattccgcccagccatttcgcaagcatctcaaggcctcccgcataaaaagagagaaagcagactgctttctctcctttgttcattctgctactgtttcattttatcgcgaagcaccatttgtaaaatgccgccgtggcgatagtaatcaatttccacttcactgtcaaaacggacaacaacttcaaatgtttttaccgtaccgtcttcactgattgctctgacagtcagcaagtcgcgcggacgtacagattcatcaacatccacctcgatgacttccttaccggttaagccgagtgtatccgcgttttcaccctgtttgaactgaagcggcagcacacccatgaagacgaggttgcttctgtgaattctttcaaagctttcggcaatgactgttctgatgccgagcaggtttgttccttttgcagcccagtcacgtgaagagcccattccgtaatcttttccggccaggacgacaagacccgttttatcttctttataccgcatgcaggcatcataaatagatgtcactttcccggtaggccaatgtgttgtgtatccgccttctgtacccggtgcgatttggtttttaatgcggatattggcgaatgttcctctcatcatgacttcatggtttccgcggcgtgagccgtaagagttaaagtcacgaggagaaacgcctttttcctgcaggtatttgcccgccggtgtgtcttttccgatcgctccggccggagaaatgtggtcagtcgtcacagaatcgccgaatttgccgacaacgcgaagtcctcttaaaggctcaacttttcccggctctacagacatttcctcaaagaacggcgggttttgaatgtaagtggaatcctgatcccacttgtacagcgcttcatccgtcgtttcgatttcgttccagcgctggttgtcgtcaaataccgtttcatactctttgcggaataattccggcgtaacagtctgtttgacgagagaattgatttcatccatggacggccagatgtcatcgaaataaacattttgtccgtcatttccgacaccgatcggatccgttttcaggttgatattcacagtgcctgctaatgcgtatgcgacaacaagcggaggtgacgcaaggtagtttcctttgacaagcggatggatccggccttcaaagtttctgttacctgacaagacagaagtgatcaagagatcatttttagcaaccgcttcttcaatctctggagaaagcgggccggagttcccgatacatgtcgtacagccataccctacgaggttaaagccgagctccttcatgtaaggaagcaggcctgagttgactaagtatccagtaacaaccttagaccccggtgcaagtgatgttttaacataattcggcactttcaagcctaattctaccgcttttttggctaccaatccggcaccgattaatacataagggtttgatgtattcgtacagcttgtaatagcggcgattgcaatcgcccctgttttcataaccgcatcttcgccgctgttaagtttaaatgaaatttctttgttctcttcagcagcatccgctccgaatccttggttgccggccgggctgacaagatgttttttaaacgtttcctgcataacggaaagcgggattaaatcctgcggacgtttcggtcctgataggttcgcttcaatttttgacagatcaatttccacaacgtctgtaaaaatcggctcttccgcgtcaggcgtatagaataaaccgttgttgcggcagtatgcttccacaatatcgatctgctcttcttcacggccggtcagacgcaggtaagaaagtgcttcctcgtcaaccgggaagaatccgcaagtcgctccgtattccggcgccatattggcaatagtcgcccgatccgcaagcggaagctcagcaacaccaggaccgaagaattcaacaaatttattgactacacctttttcgcgcagcacttgagtgactttcagcgccaagtcagtcgccgtcgttccgttaggcaattttccgacaagtttcgcgccgatgacctcaggaacagggaaatatgaaggctggccgagcattcccgcttccgcctcaataccgccgacaccccagccgaggacgccgattccgttaatcattgttgtatgggaatctgttcccaccaatgtatcaggatatgtcacaagttctccgtcttcctctttcgtatgaacgacacttgccaaaaactcaaggtttacctggtgaacgatacctgttgcaggcggaacggcctgataattgttaaacgctttctttgcccagcttaaaaatttataacgttctgcatttctttcgaattctaagtccatattaatggctaacgcgtcttccgtaccggctttgtcgacttgtacggagtggtcaatgaccaggtcaaccggaatttcaggattgattttatcagggtctccgccgacagaagccatggcttttcttaaagatgccaggtcaactacggccggaacgccggtaaagtcctgtagaataacccgtgaaggtttaaacggcacatcgatatcttttaattcagcagtaccccatcttgctaaattttcaacatgttcttttgtaatgacgcgtccgtctacctgacgcaaaacggattccaaaagaaccttaatagaataaggaagttttgaaacattgccgacccctgcgtcttccaatgcttttaatgaatagtagttgtatgttttcccatttgaagaaaatgtttttcttgcttggaaaacgtcttgtgttgcgactttttgctgatttgtcatttcccaaaatcccccttcaatgatcaagatcgtcctttagatgaatgttcacattccatcacaattttctcacaatttcatcttagtataaaatcatacataagtaaatatcaatgtttttattaaatacaataagatcgtcttatcagcatgattttcggtaaattttgtccgattttccgcctcatacaacgggctgtaaagagccatattaatgttgaggtgatgatcatggtaaaacggaaagccaatcatgtcattaacggcatgaatgatgcgaaaagccaaggcaaaggcgcgggttatatagaaaatgaccagctcgtcctgacagaagaagaacggcagaacaataaaaaaagaaaaacaaaccaatagccggaacaccttaaaaaggaggctttaacatgacaaataaaaatacgagtaaagatatgcataaaaatgctccgaagggccataaccccggccagccggaaccgctgagcggaagcaaaaaagtgaaaaaccgcaaccatacaagacaaaaacataatacaagccacgatatgtaaaacagaccccgtgtctgtttttttgtgccattcacccattcaaagcttctgcatacgttatagcaaggctttttaatatggaggaatgcttccatgaatcactcaaaaaacgctgaagaatttgatgatacggaagaatggctgcggcagttttacgaggacccgtatgcttggtatgacgagacgctgccgatcgatctatatgaaacaagccgtcaatatatcattgaagccgacctgacggcgctgaagcaggtgcaagcgataaccgtcactctttcggggaatgagtttatgctctctgttaaaacgcttgaacggacgttaaacaaacaaatgatgcttcctttttatctgaatgacaaacatattttcactgatttcaccaaccatattctgaccgtctccatgaacaaggagccaaatgagactcctgcctctttttcctttcaatttcctctataacataaaaaagccgctttcatccctcaatggaagcggcttttttgtccggtcatatcagtcatataccctcaaagtgaaactcccatggccaaatagcagaatcactatacgatagaatatgttctaccaaccggaatgactggacatctatcattttttctattctttttttcatgtgttcttctattctgtcttcgtttacaatatggttaaagtaaggaggagatagaacaatgctggaaggctggtttatgtggtttattttattttgggtcatcgtgatgatcggattgctgtctatcggcgggttttttatgtttcgaaaatttttaaaacgcttaccgaaagaagacggccggtcagaactggattggcaggactattatattgaaaaaagcaggcacttatggaatgagggtgacaaggcgtttttggatgaattggtcgcccccgtgccggagctctttcgggatgtagccaaagcgaaaatcgccggaaaaatcggtgaactttccttagcggaggaagctgaacaaataaaccgtgatttaatcatcaggggttacatactggccactcctaagcgtgatcatcaatttttaaaaaagcatctccgtgaaaaacagattgatcttactccttatcaagccctgctcaaataaaaaacctttccggcgcacggaaaggttttaattcatctgaatatcagcggtcttcagttcattcgaaagtttgcggtaagacaaaaacatcgcgatgcgccacgggacaatcattccgaaagccagaatccaaaacattccgcttaaagctccgtaatcaaccgtcgtgctcaaaatggatttcatagcgattctgataaccaagagaccaatcaggataaacacaaacgcttttgaccgttttaaatagatttcattatttttaatctcaaatttagatgttttaatcagaaaaatagagaagatcacgcccagcgtaatggcctccaaaaattcttcgcccgtcactctgaaaatcggaaaaaggaacataagcgctcccgtactcatgaaaatcggcgggagaattatttttttaggtgaagcgggcttgtcggaggatttaatcctgacgatcatcacggaaattgccatggccgctgcaataacggatgaaattataatcatcatctttatcattcctttgcttgcacggagtttgatactatatactatactccaaaaacataaaaaaaaccaatttgaaaagagaacacgtttacgttcccgttacccggcctacggcctccagcactttagatgcttcaaacggtttaacgataaagtctttagcgcctaattcaatcgcttccagaacgatccgctgctgccgcatggcggtgcacatgatgatccgggctttcgggtcaaaagctaaaatatcctgcagggcctgtataccgtttttgaccggcatggtaatatccattgtcaccaggtcgggacggattttttgatatactgccagagcttcctcaccgtcagccgcttccccggccactgtgtaattcgccgattccagaatctctctgattttcaccctcatgaacttggcgtcatctacaactaaaactcgtgtcatattcccctccacatatttaacattaactagtcttattgtaccaaaaacaaaagggtatataatagttcaaaagttattaatccgttacagacccgtaaatcctccgaaaagatttgacagaacgatcagaatgtagctcatccagttaaaaaacagcataactccgatcagaatcataagaatgccgccgattttcatgataagcagctgatgcttgcgaatccaattcattctggtaataaaaaatgaaagaacaagaaaaggaatcgcaaatccgagaacatataaaaacatatacggcactgctgaagaaggatttgtattggccagcgaaaacacggctcctaaaataggcccgctgcacggcgaccagccggctgcaaacgcaagaccgatcagaaccgaaccgataaacccctccggacggcgcttaaagtgaatgcgccgctctttcatcatgaatttcggctgaaacacaccggcagtaatcagcccgaaaaggatcagcatgatagcgccaaactggcggatcgcttcatgatattgggtaaaaaaactgccgataaacgaagttccatatcccaatgcgataaaaatcacggagaaaccaagcaaaaaacaaagtgtatgcacaaggccgcgcttttgcagcatcaccttttctgttttcacctcgtccatactgacaccagttatgtaagataaaaaggcggggtacaacggcagacagcatggagaaatgaaagacagaaatccggccccaaacgtcagaaagtaattaaaactcacgatgacacactcccttcgagttatgacaaaatcatttcatttttttaacactttcccgagaaggattactttttatagaaaaagcttatataatttaatttgacatcgagatattatactccttcttatttgaaaaacagtataaatgtggatataataatagcgactcaggtgaaagatttatgtatgaaaggatatatccctgtgattagagagcatctattaaatgaaattgaaaaaaaacgggcagagctgcttaaaatcgtcatgacaaacggaatgacatcaaacattacgatagaactcagccaggagcttgaccaccttctcatacaataccaaaaagaactgcacaccggcagttggggtgaaacatgacgccaaaataaaaaaccctctccgggttttttatttttataaccatgtatctctatatcataatctgtacgtattatttcgcttgattattcatggctttcatcatttgattaattttcttttgagaaggtttcattcccatttgcatcatcatcatgcgtaacatttgttcattaataggcggattctttttcaaatagctcatcatatatttacgagcaataaaaaacccgagtgcaacacctatgagcaatgcgacaacgcccactaggatgccaacccataaagtcattttatttcctccttcatgttgtctagtttaaagtgtactaaaccaaaggctattatacaacatttacatctctttttcctcgtttttagacaaaatttctttctctgaccggatttaaccacccgtagcgccgtgtcttgaaatccattgcaagaaaacaggggctgattttacgcagaatctcaaagaaaatcgtttccgcctcataatctcccgaagccgcaatctcaattaaactgtctttcatcatgaaggtggcgcggcccttttctccgggcagtgtaagccggtaaatggaatccaaacggctgtaactcattcggtttaaatgcagctggagacgctgatgcatatgtatcaccggaatcggttccgttatatattgaacttgcttttctgtcaattgatattcatggggtgtcaggtctgtccaatgatagtctcgaaacaactcaaacatagccgtttcccgcccgaagtagtggttcgcaaactcatcctttatcaggtgcgtatagtaatgacgttccatttcctcatccccttttacagcgcttcgttattgctttctattatacaaaaggagaaaagaaagaattgtctattactgttacgccgccccttctatttttgtcgcataaacaggaaaaagaggatgatttgactcatcctcttttgtctcgttatttgtttaaaagttttttcacgcggtcaaccacgttttctgcagtaaacccgtattctttcataattgtttctcccggagctgaagcaccgaaacggtcaattgcgagaacgtctccttcaagaccggtaaatttaccccatccgaagcttgaacccatttcgatcgcaagacgtttcgtcacattcggaggaagcacgctgtttttgtactcggccgattgtttttcaaagcggtcccagctcggcatgctgactacagatacgtgaatgttttcttcagccagtttcgcttgagcttcgatcgcaagtccgacttcagaacctgtcgctaaaagaagagcggccggtgattccgtttgggcttttgaaacgatataagcccctttttccacgcccgcatacgcttcttcagcctgctgatcaatcgtcggcaggttttggcgtgtcaatacaagagctgtcggatgatcttggctttgaacggcaaccttccatgcagctgcggtttcatttccgtcagcaggtctgatcacagaaaggttaggaagtgcgcgtaaagaagcaagctgctcaatcggttcgtgagtcggcccgtcctctcctacggcaatactgtcatgcgtgaatacataagtgacgggaagacccatcaatgacgccagacgaatggcaggtcttaaataatcagagaacacaaagaatgtgccgccgaatacgcggaggccgccgtgaagcgccattccgtttaatgcagcgcccatcgcaaattcacggacaccgaaccagaagtttttcccggcgtagtctttggccgtgaagtctcctccatttttgattgtcgttttatttgaacccgcaaggtcagcagatccccccacaaagaaaggaattttcttggcgatcccgttcagcacctcacctgaagatgcgcgggaagcaaggctgctgcctttttcataaacgggaacttcctgatcccagtctttaggaagctcgcctttcattccgagtgacagctgttcagcaagctcaggatatttttctttataagccgcgaacagctcattccattcctgttcttttttcgagcctgcttcttttacagcttgattgaaatgcccgtatacttcttccggaacataaaaatcttcttcaaacgtccaagcatacgcttcttttgtcagcttgctctcttcttgtcctaacggagcgccgtgaacgccggatgtgcccgcgcggtttggagaaccgaaaccgatggtggttttcacttcgatcaatgtcggttttttatcattctggcgcgctttttcaattgcagccgtcaattcagcgatgttgtttccatcctcaacataaagaacttcccagttcattgcttcaaaacgctgctttacattttcagagaaagaacggtctaaatcgccgtctaaagaaatgtcattagaatcgtataatacgatcaggcggcctaattcaagatggcctgcaagagaagctgcttcggaagaaatgccttccattaaatcgccgtctccgcaaatactgtatgtataatgatcaactacgttgaatgaatcacggttatatgtctcagccagatggcgttctgcaattgccattcccactgccattgcaataccctgtccaagcggcccggtagttgcgtctactccggctgtatgcccgaactccggatgtcccggtgttttgcttccccattgacggaactgtttcaagtcttcaatgctgaggtcatatccgcttaaatgcagcatgctgtataaaagcattgaaccgtggcctgctgataaaacaaagcggtcgcggttaaaccagcccggattctgcgggtttacattcataaatttcgtccacagcgtgtatgccatcggagcggctcccatcggcatgcccggatgtccggaattcgctttttcaattgcgtctatagatagtgtacgaatggtggcaactgatttcttttcaattgtatccattataatccccttccttattgttgtaccttttcatcataaagcgatgctgactttttctcaactctttcagcttaaatttgagataaacttgttgaaaattgtcgtaaagcacatcctgatattagtatatacgaaaaaagaatacgtattgccgtattctttctgtttaatgaagattatttttctgttgttctctttttaatttttcaggggtgacatcgttgccttccggatcaatcacttttacgctctttaacgtatttttcattgaggagcggaatcctttcaaatactcctggcgaagcttttgctgttcagctttttcctcatccgttatcgtgtttgatttagctttttgagccaattcgttaattcttgcgattttttctttagaaatcataataagctcctttggtgcgtgttgattatatactactaaaacgcagtcttttttacaactgatgcgcgtcagctgccttctgtgtctgcgatatattcctgaaaccgccggtgaaccgtggctttggacacatcgtagccgaatccccttaaggtcgctgcgatttctgcaaaggtaagcttgttggctctcagcctgataatttccgaaaccggaacctcttttttttcttttccgctgttttcatgtctgtttttcagattccgttcaggtttgtagccgtttttcacggctcttttcattccccgccggattttcatattgtgaattttcctttgatattcctcaacaatactgacgatttcgagtaccatcgaatcagcttcggaaagctccagttcacctttatgagccgtcgtatatatttttacgttctccctgtaaatgcaatgcaaaagcgcaatcttggcgtttcctcttcccaatctcgtttcgtcctgcaccaatatcgcgtcaatatgtgattttttaatttcatcaagcatttcaaatactccgtcgcggtccatttcgtaaccgctggctttctcagaaatgactttcacgacttccatgccgtttgcagcagcaatctcactgagctcctcttcctgtctttttaatgacgtttgctgctgttctttgtttgtgcttacgcgggcataaatgagcgccttcatttctctctttcctctctaattgacaatggccagctgatatacggccggatgctttttcttaaccggaagaataagttcgtctccgggctttatatcagcagtttggagatgattattctccgtcacccactcaatgaaatcttctttattaatgtgtttcttttctgctacatgatccgcaagtgaccagagtgtatcgccgtcctgaacctttattttaacatattggctgagggactgatcatttcccgcacatgagacaagtaaaatagcggcacttaaaatcgcagtaaacagtccgacaaatataatagattctttcgccatgtaaacaacctccgataagaatgtttgttcgctttttataccttttagtatatacgaacaaacgtttctgtcaatcgtttttttcgaacctatgtttgtactgtcaggaaaatcatgctataatctacttaaaatcgacgttttgaggtgcgaaatatgacgaagctatcaaaaaggcagcttgatatcctgcgttttattaaagaagaggtaaaaacgaaaggatatccgccttctgtaagagagataggagaagcagtaggactggcttccagttcaaccgtgcacggccatttggcgcggctggagacaaaaggcctgatcagacgggacccaactaaaccgagggcgattgaggtattggatgaagaagaagtccacattccgaaaagccaggtcgtaaacgttccggtcatcgggaaagtgacggcgggtattccgattacggctgttgaaaatatcgacgagtattttccgcttcctgaccggatggttcctccgggcgaacatgtctttatgttagaaatcatgggagaaagtatgatcgacgccggcatttttgacaaagattacgtcattgtcaaacagcagaacacggccaataacggagaaatcgtcgtagctatgaccgaagatgatgaagcgacggtcaagcgcttctataaagaagacaattatgtgcggctgcagccggaaaatccgacgatggagccgattatcctgcaaaacgtaagcattttggggaaagttatcggcgtattcagagccgtacattaattctattaaacttcatttatcgtaaaaaaccccttacagaggggtttttttgcataaaaaaagcagattcgccctggcttaagaaacgaatctgctaaggaggaaaaacttacattcttattatccgacatcacacttttgaagtcaactaataatgtttccctcgagaaacttttcattcatttttcaactttgtatatttgtgcgtgatgaatttacttttgtttatgttttctttgggcgggtgcattaaaatttatatatgaatatttagtacatagtacaataatttatatttaaatataaaaaaacccgctgcctttagcgagtatctattttcaatcaaaatgataatattctacaccgtaaaaccctttaatatagacggggccacagacgtttgaagaactttcaaccagaattctgtatttgtgatacggatcaattgattttttatcctgggcactgaggtttaaccagctgccgctgtagtttttagaacttaatgtataaaaattcccgttcagcgccatccgctggagtttcatgcttaaaccgcacgaagagttgttcattatggtgaacttatatcctaaaaagtaatcgtcggcagctacagcccccggattttcaatatgaaactcttttgcatttccctccaaagtgaagcttgtttttgatccgaattcagtggtagccgctttagctgagtgtattccgctaaaacataataaaaaaacagcaatacatatccagtattttttcatttgcatccccctttttacatattttaacttgtgaatcctgtgatgtctattcacattttattaaaacgtatgctttataaccactatataccagtttaaaaatttgcggattgcttacaatgaagactaaacgaaataacgaaggtggttcaaatgaaacacgtaattgctttcgcttctaaaacggcgctcacacttgctttactgtacattgttctggatcttatgtaccaagtaacctttttaaacgttctgtttattacagtgatcttaagtttaatcacttattttgcgggtgattgcatgattctgccgagaacaagcaatttcacagccgttgcagctgatttcgggatttcattcattatattatggatattccttatgaacattggcggatttaatgtctctcctgccgcggcatcggttatctctgcactttgcatttctgtttttgaggcattttttcaccggtatttgcagcaatatgtacttcccgaagattatcaggacacaacagagacggatagcacgctatggagctatcaaaccgaggcgtctgaagaattagtgccggaaaaagaccctcaggaaaaaacataaaaaggaggcaatcgcctccttctcattttatttttgcttctgatcgtccagcggcagctgcagcagtgagtctgtgcctgtcgctttcggcgtttttccgtcccatttttcaatccatttatatttgatcatctcatcggacattgatttctttatgatttcgttataatcagcgatcccttccgcttcaatttttttctttttcgcttcggcttcggctattttaatttcagtttgtgtccgttcaagttcctgtgaagacttcacccttgcatcgatagcttcctgtgtggctttatccggcttcggtacgccaagcgtcagatcatcaattaaaaatccaagactcttcatatcatcagcaaatctcttttgaacatcggcagcggcttctgcagatttttgcccgtatgtgtcaataaccgagtatttgctgattgattttcgcgccgcatcccacagccttgtttttaaatatgtattttcaatcgtttcaacgtctaccgctccgaatttgttaaacagatcgactactttatcaggctgcacgacatagttgtaagcgatatccatttctatatttttaccgtctgaggttgccacttttatattttcattattcactgtctgcatacgcaccggatattccgttactttattaaataatccgactaagtgccagccttggtccaatgtgtcggattttaccccgccattcggtgagtatacaaccccgacataaccgttcggtattttttcaatgaatagtgacgctgtaacgcccgcaattaaaagggctgcacctataatcacaccgccgataattttttttttgtttccgcgcttattttcgctcatgctgatcttcttcctcccatgactttttgaattttttggctccgcttcccacttgtttaaagattggactaagcatcagccataaaccgaatccgatgatgacaagaagaatgatagacccgatcatcactttcatttgcccacctcttttctttcatcctgtcaattatgtatacgatcttaagaacttaaagtttcataaatttcaaaagaaaaagccccgccgacaaaataggcgtgcttattaatatttgtcactgataaaatcagaaatcgtttttgtgaattggtaaaaggtcccgttttgtgtggatgctctgcttttcagcgtaaaagtgtcaaatagtgattttctgaagccggtgctcatttcgatttgaatactcaatccggatgaagattgattggcaaggttgttcggactgacgcctgcatatttatcatttatgccaagaagaacggcaggatacccgtgccgtttcagcacatcggtcaaaagttcggcccgttctctgtctgtaccgccgatttttatctttttatcgtcactgccgtaaccgtgcaatgaaatgacatgagagtgctctttcaccatttgcacggccttaggttcatcgaaatgcgaacttgtcaaatgcagagccgcattaccggctggttttaacccttcaaataaatataaactccggttttcggcaatttctctggctaactcactggtccccggctctatgcctccgccgtgtatagctaatatgaggacagaagggtcatgctctcgcgttgaaatggaaaaatcggaaggatcttcattcagctttaattcctcgaaactgccgtaaatatctgaagcggcatcagcccgaaagaacggcagaagcaaaaacggtaaaattaaaactaaaattccttttttggttattgatggcatttgtatgtttatgttacaatacaaatgcttcagcctttgaagcgaacggcagaacagggtgactttggacggtttcttctgctctgcctctttgccagctgctttacggtctattcttctaaccctttttgccataacatcatcctttcttttgtttacacttttgtcacaatattatatacgttggacaaaacctccgttcatcttgaagaataaaaacatcaaaacaacttctatcctttaacctaaaaaagtctttctgttcaaagagacggaaggcttaaatgataaaaatgaaacccttctccagttttggaggagagtgaggactgcagggaaatcattttatcaatatgctgagctgggctggcgtccgggtcaaatatttgctccggcatagacggttacggagcggccggttatttcgaagtcaaattcgaacgtgacgtatgatttcccaattcaagaatccccgaaacaaattgaatgtaactgctgtttccataaaaaaaaagactgctgttaagcagtcttttttcgttttatttcgtacctgttgatcccagtccgccgcggtcattgttcccgagcttgtctacttcgatcagctccacttcaggcattttcttcatgattctgaattggcagatccgctcccccttggaaatgtcggtatcccgaagcgcgaatgcaggaaaaaaccagaagtcattgtcgcctttataagattcatcaatgactcccattgaatttgtctgaatgatagcgaaatgcttatatgtacttgaacgcggaacgacatgggcctcatatccttccggcagttccatcgcaactccaagcgggataagtttgaattcaccttttttgattgttatatcttcagctgcccgcaaatcaatccaatcgccctgttcaattttactgattctcgtttgcgtatcatctgaatatttaattttgatttgtaaagtcattttcgctgctccttttgcttccctatttcagtcgtattgatgaccaatccgtgccccattataccatttaactgataaaaatgttgattttggtgtatatgcagccgaagaggaagcactgcgaagccaatgagaataaacctaaaatgagggcccctcctatcagtttttcctccattttcacatgacagcttcaattacaataatacaaagctttatatccgttctttcaacagagcttttttaaaatttcaccttggtttcaaaaggaatttcgttctgaataaagaatttgaagaataagcgcttaaagggcgcacgactcttttctgtcccctgcctcaggcgcttatatcaaaagaaagaggtgtctttagaatggttcaatttaaaaactttcctgatccgtctttaaacgccccattgcagtctcgccctgcacagccctctgaattggagcatctcaaagcaaggatgcagaattttattaagcattccgcaacggatgataatcttgagatcgcagatgcccgggtgacggcggaaggaatggtcacctcacttttaaaagaacggcttgataccgaatacgaaatgcttatgaataaaatcacccgggaagtgaatgtggaggactacggagcggtccctgacggccgggacaatacggaagcttttcggagagcgatcgggaacggccgggtcaaagtaaatgttcccgcaggagaatttttggttcaagggataaaactcccctcatggactaccatttccggtgagggacaagggattaccgtgcttaagcttcatgaggacactcccgcattcgaatgggtcattactaacgatgattacgaaaatggaaaccgtaatatttttgtggaaaacatgactttagactggaatcctgatcgtcaatgcggggtcaggaaccccggaggacagttttccagctgtttaacgtttgctaatgtgcaatacggctggattaagaatgttgaaacggttaacgcgggtctccatggtattgatattacatctccgacttacgatcatttgcctgaaacagaatggacgaaagacggctgccgatatatatggattgataactgtgtggcatacggcgccggagacgacggcattaccacccattacagcgagtatattttcatttccaactgccattccggaaacccccgcggcacagagcatgctgagggcagcgcaaactcgaacggcattgaaattgacgacggctctaaacatgtatggcttttaaataactatacgagcggaaatatccgcgggattgaggtaaaggcgcacagcctgtggccggcttctcaaaatgttcatattatcggtcatgtttcgtatcgtgatgtacgttcatttgatattcgtcatatcggccatcatcaggcctcagaccccgaaagcacgacggcttatgatgttactttaaccgattgcaccgcgattgaaccggtgttcaatgctctctatgacggtgtgaccccgagggcgctggtcatctctgcttataaaaacgttaatgtaaacggattcacagctattggtgatccctcatacgactatggcgggaatccagtcgtggctcttcaataccgcagtcaaaatattacgatcaacggcattaaaatacgcggctttacacaagccggtgttgacatcaatatatccggcggatcaaataaaaccgattatgttaaaattttaaattttgatatatacaagtcatctcctaaaggcatctcaatcggcggaggccaatataacgtaaatattatgaacggtacgatgatcggagatggcggttccgtcggaattacgtcccctaacagtcaggccgtcattctcggggtgcaagcggaaggttacagcgcggccgcatctataaaaggacagacttatgagcagatccccgtcaatttaaagggaggcgcacagctcgcgaccagctccggttttgcattcaacccgacaagcgccgttattgcgggaacaggcgatattacggccagaggtgacagaaatgcgatcatcagctcttccggaggttcaagttctgaaggttcaagggcatttatcgccgcttcaaacaatgtccatattacgggcagcaaagtctccagaacgattctgtcatcagaaagcattacattggaagaaccatacacggttgccggagggcatcagtccatcaaatggaaacttgattcagcgggcggtcacggtacgttcgccggagctgtcacctcttccctgtcagggtacggagaatattttgaaagtgtaaccggccagacaattcccgccgggacgatcgtcacagtgaaaggcgaaaaaattgaatcggctcacgtcggagattacatgctcggcgtcatttcagaaacagccgcttttatctcaggagccgcaagcttcggatggcaaagccgctttttgacaaacgagttcggcggtttcatttacgaaaatgtgactgacgaggaaacaggagaaacggtacgcgtgccgaaacaaaacccagactgcagtccggctcttgaagctgactatgaagcacgcgcggccagagacgaatggcacattgtcggactcaacggccggcattacgtacgggtcgacggtacggtcagcccgggagattatatcacggctcataacggaatcgggactaaagccgcggaaggctggaaggtattgaaactgacggccttatacagttctgaaaaagggtacggcattgcaattgcggttatcaaatagggtctcaatatcaggatcatctcttctctattctatcgggcgggtatgatcctgttttttataccgaatgagatgcctctttttcagcataccgtttcatttgtccaagccatccatgctttctgtcatagaatactaccgtcagatgaaaaaaggaggaatatgagtatggatatgggtatggatatgggtatgggtatggatatggacatggatatgaacggacattatgatcaccacccaaagcagcctaaacaaaaaaagaagaaacaagataaaaagcatcttgattatgattacatcgttgtttataaaagaaaatgtaaaaaatgtaaaaaatgctactaacttgacatatcaacactttttacacccggtaaactccgggtgttttttctattatggcgtttctccgggctattttcacccaaaatccggtcatcctatcacaatacataaaaagactctattattttcttcccttttcgcctaatgaaaagtatttcatttacagaaaacaacacaaatggaatgacattacttttgagaaaatctactctttgcttggtcaatttttctgcgataccatgaatttgcaacaatttttaaaaatttcctcaggaggtcatagccattaaaaaatcgccagaacgatagtcggatcatgcttagctttatctctaacaattcctttcacagccagtgcctcagcagccagtcagtctaaacacgcaaacgcgcctcacgtttcacccgttgcaaatccgttagaaagtaaattatccaaaacagcagaccaaaacgtaaaagcagcaggtgttgatgccgggctgaacgtaaacgtagatgttctcggaatctcagatcgcattgctgaagcggttaagtaagatcaaaaccgaaccggctgggtaaaaaatgtcatggaaacaacattttacgcatcaggacagaagtacaacgtcatggtgttcaatttaaatcaagaatatgaagaccgctttaacggcgttcagttttacggatcagccgtttatgacggtattacttacggaatctgggtcttcgaagacgggtccttcgataacaaaggagacgggggctggatcaattgggcattcagagggtggttcgatcgtgataatcagcgtattgaattccacagaccttaatacggagaaaacttgcggcagcgcccgcaagttttttttaactggactgcacatttttcaccgttataacgactatacttgaaatgcgggctccgatcgcagccccggtaaagtctttcaaagtgagggtataccatgtcaaagtctttaaaaatagtgttgtggagcatattggtgttcatcatcttgttagtgattatcggaatcgtttcttacaatcaaactccgtctgcagaaagcacagcaaaaagaatgctttacagcgtctaatcaatgttaaatcttcatcggctttttttatttaccgcagaacacttgaagttcttctatttagatcgttaacgttcccattcggaatggagtatacgcgtgtatcatcaggcaatccgttttgatacatggttccgattatgcccttcgcatcttttttctcgattccccatcacattcccttttttcataatactgctcttgaaaccaaccaatcatttcttcagcctgttccgttgaatcaaaaggttccaatcctaatagcgtgttgcattttcatttttaaaaaaacaagccaactgcgcatcctcttcgcaacttctcaatgtatgagcctactcgtttctattacaggaagcagtacgatgcctccttttactcattttaacggatggtcatgtaaaggaaatatagactaaaaaaactttttttcaaaaagtaaactagcatccctatcaaacttttcatttcggcataatatgtattaatcctctttaggaggtgagattatatgggattctcaggtggttatggtagctcctttgcgttaatcgtggtgctattcattttattaatcatcgttggggcttctttcctcggcggttattaagaatcctcttacctccgcatccatgtcagcagcacctccatgatcgtacggcgccataaatgaaatgtttatggcgctctgctgtttttccccttttcattcacacattaaaactaaaaagatcggccgatgtatcaacatgcagccgatcagtaattcatatattattgtgtaaggtttacatcgatgacgttatagaaggcattggaagtatccgcaacgtcccatacccctaaaatgacatgatacccgcttcgatcagtcggcacaaaaatcttatgagtcagattcgtatctgccttggaaccgtcgtggtttaccgttccgattaattcgaattcatctcttgacaaaggtttattcggattccagtttttcttggtgatataatagtgccactttgatgtcgcatgaggggccgtgtagtaccaagtaaaggtgttaaaaccgccgcggatgttttgttttacccaataatctgcagtctgcttgtctaaaccgaagtcaatttgtcccgatcccccatttgcagacgcgattcttccatccggcggacctgcagccggaaatcctttcggcccttctacagactgaggattatcaatgacggagccatatttctgcgcagcggccgtccagcccaatgtttgtttctctaatgctcccatgtacgctctgctgacgggctcttttatatacccgtgtgcagatgcatcacttgaatagaaagcgcctccaataccaagagtaacagttaaaactgcagcttttactaaacctttcattactgcatcatcctccctcttttgttaataaaaacccttcagtgtatacacttcacgatggaggatgaaatgaccttccttttcttgataggaaaaagcaatgaggttggcgcttttccctttgttttttataatcataaagaaaaagccgggccgattctgttatcgaatccgcgattgaccggcccgccccttttgcgcagaacttcattcgctggatttgccggtttcctttcggataaccggtgctacttccgctgctaatcgttcgatgttttccgcggcttttttaaacggcatacctcctatatcgatttgcgcgagaaatcgctgatgtccgaataactcgtattgatgcatgattttttcaatgatctgctgtgagcttcccacaaataaagctgtttcttttccggacgcccgcgcaaaatcttccttcgttaaaggctcatcgatcccgtgatatgaatgaacgtgagaccagtaatttgaatgatacggataaaattcttgtattgcctgttcattcgtttttgaaatgaacatatgtccggttacggcaaccttcacattttccggaggatgaccggctttagaagccgcttcccggtatttgtcaacaagcggcttagatgacatcggatcaccgctcagtacagctaatgccaaccccgcacctgcacgcccggcccgttctgcgctttccggagtccccgaaacacctaaccatagcggaatgcttccgcgaaaaggccgaggagaaatttctgcctcgcgcagcggcggccggtaacgtcctttccaggtaaccgattcttccccggaatttaattttaaaaaaaggtcaatgtgttcttcaaacagttctttataatggcctacgtcataaccgaaaagaggaaacgagtctaaaaatgcgccccgtcccgcaatgatttccgcccggccgtctgaaatcagatcaagcgttgcaaaatcctcaaataaacggacgggatctgcggtggataatacagtcgtggcactggtcagcttaatattttcagtgatctgtgaaatcgctgataagatggccggcggcgaagataccgcataatcaagacgatgatgctcgcctacaccgaatacatcaagccctgcgtcgtcagccagtttcgccagcttcatcaattcatctatccgctgctttgcgctgactgttttccctgtcagaggatcgggatataattctgcaaatgaataaattccaatttccatacaatcacggtgttcagccctcacatttctctcctcctgcactgagtaaaaaagcttttatgttattctattcagccgttttacaaataggaattcgttcaaaataaatacagaaggtggtatgagagaaaaaaagtttctggcgtccttcaattctgcccattatactcatgcagccggactaggcaagaacaaagccggcacaagcggattcgaattcatgtgttcattttcagtccaattcaatccaatcgtgatattgatcataaagctttcgtattcttccggcatcaagagcaatgacttcacaccctctgtcatcatacagaaagaaaataatatcttttgtcatattcacaaagaaaacatcgggatacccaacggaacagcccccgaaccttggcttcagcggaaaatcttcgtggacggctgccttaagtaattgggggatacgcagatctttccgtttacataataaagaaaactgctgcatttcatattcttcttcgaccgggcatggacaggtcttcacttgaatccgatataaatcatccttacacttcagaaacggctgataaacctttaattttctcgcgtgattaccttgagttttgtgcttatacacgttggcaacaaggaacatgtcatcgctatgttcaaacatctcattgaaaaatgcggcggtttgatgatgaacaagctgaaaatactcaagattcaaagcaccgctttcattaaattgatacatattgccgccgagagaattcccacgtcccattgatgataaacgccggacactaattttaaagtcggaagcctttccttcagataatcatttattttcattcaaacatctcactttccttttcccgctccagaggcagaagaagccgaaaacattccgcttatttctttttcacccttgtaatattattcagattggaatacaatgaaatggaacactgtgaaccccattgatcagggtggatgctggtcacattcatcctgatcctttcttttacacaagatcgccccaactttgaacccctccgtttccaaccctattcattgatattacatatatttcaatggtattattttcttatacataagcatcaagaggtgtccgctttgaacaacatcagaagattgagagaatatttccggtctcaccgtaaaataggtctggctgcagacttgcttacggctgtattgcttatctcattatccattcttttttacggatgccggcagggagctgtcaatggtttctttatgtatgtcttagtaagtaattttatcggctccaatgcctcttttatcgacttcagcacatcgaggaaaaacagtcaaaaataaaggctctggtcaaaaagagggttataccgccctctttttattctttcagtcataccaatgcgttcttttcaggttgaatttttctgaataggactcatgatcggttttccatgctgcttcaacagtgatttcatgaccgattacttcatgttccggcatatattcaaacgtttgaatatggtcttctcccgttccgccgccttctaatttctctccggtgtattctgaaagatgatagtctttatcttcaccatatttccggccgtcaacaaataatgttaatctcttaatcaccgtgttcttttcattcactttattacctctgtaatacaaattcaagaaatagttagggccgatagaggtcttgcctgatttttcgattgacgcttcccacgtcttgctttggctatagccgatatatttaactttttctcctgaaattaaagaaaacagtgcaaatccggctgctattatgagaacagtgataataaccagcaattttttaatgactttacgttttttcatgacatcccgcctttatcatttagaacgtatgaatattagaattgttacatttaatttgaaagaataataaaaagggattctaattccaggaataaaaaaatactaagaagatcatattccccttagcttcacatcccagactgccatgcaataatgataaaagtcgtccaaaaagttgtgactaaaataagcataacggttacaatcattaaaatgagacaacttattgttagaattgagtctttgtttttgttaagaatcagagtaaccattgatcctgcagcaaatagatacgacaaaaccgcaccgacccaataccacagcatagagtcattgctccagtaagccattgactgcatataaatactgaatataaatcctgacaatgctaatagaaacgaaactaaatttgatttcaagttagagttcctttcttcataagttttatttttaggaacggtcatacatctgataacaccttttatgcgatatgcttcgccgctttgtctgcatattttaattcttatttcgtttttaaataagtttacgaaaaaagaaatcatataaagttcacctgaaacgccgatttaaaattaaatagatgttttataagcgttaattgcttgatttctcaaaagcatatttatcattcgcaaccattccaagattgtatgcttgtttgatgatatccagcacttgattatcagtttcagttacaactcgtccaccagttattctggatttccaataatcaaactggtgatttcattctgaacagcttttaacattttgagtatcaaccacttttccattctcgagcgcatcattgctgattcgattacttcccgctccttctgtcgttaaactgcaaaatgtccatcacattcatcctctctccaattttacaacgttgctataatgaatttcatgattttcccaaccttcaagcttaatctttttgatcgttactaatctaagtacttttttcaattccataatccattggtatgatcggtaacctaatgaagtatttaacttaaatacaaaaaaacctgctttttcagcaaggttttttcgacaaaggggagattatttccccacaaattctattaactatgtttttgttttaaccattctttctttagcaatgcgtattggtaagtgttttcatatttaggtgttccatcctcgtgtgcagtaaatgaaataaattcaagaaaataaccttctttacgcattcctaatctttcacataatttttgtgacctgcagttatcatcttcaacatatgcataaagccttcttgcttttttttgcataaagagatactcaaagaaagccttcgcactttcacttgcgtatcccttcccttcaaaacgggcattgaaattccaacaaacagaataggtatctggctcttcttttaaataaaatagttctccgactagatcattactgtcttttaaacaaactgcaatataagagtcatctcggcttcttttttgaacgtttacggcagcttcttctaacgtagacattctgtcatcaagaaagcaattcactctcggatgtgcagaatattccaacagaccttacgcatctctctcggtaaaatttcttaaaattaagcgaagggtttcaattttttgcatttgcagtctcctgtttcattgttatcgatctttgaaaagaacttcttcaacagatcttattcgtttgttgaagaacttatctcaatctatttttactataatgatggacgttatcatctttgtcaaaaacaataatcattcatttggcgcccgcatgtaaagtactgaacaattttcgtgaaaaaccctcagtatcgaatatagaaacgagcaatagtaattaaaacaaagttaagccattaaaagcttattgagtattttttcaaacttattcacgctcatcatctcatgagtgagaaatgtcccattataaaacacgctgaaagtcgtccaaactgccggggatttttgcgccatatcttttgacgttattcgccgggcctgaaaatgaagtcctttcttttcagtcagttcctttaaatcctttaacaatccgactgcaaatgggcattgggctgtataaaataccctcattattaacggaattacttttcacctgttttttaaatacaggaggatatgcatgtttattccacgtcagtgacatcaactgaaaatagggttctgcttcatcttgcacagcaaatcccatatgttcaaagaaatgcttatcacttaaataagggagttttttcttccccactatatgaactatcccatccataccgcgggattttgcatctgacacacatttttctaacaagtgtttcgcatgtccgttattcttatatttacctgagacccaaagacaattaataaacataaaatgaggtgcgcttaccggaacccacgcttcttctgcaggtaaatattcaataaaaacttttgcccgttcgtttaggcgatagaacaccaagccatcaatcatccgatctttgagccagctcttcttttcatttaccgcatcctcatattgtttcgcacctaatgcacagcaaatatgattgtcattaatattgtccctagtcaactcaatgtattccatttttcctcacccgctttcttttggaaacatcagctttacttgcagtgaacattgtaatttctcagaaatatagagtcccagaatcaatatatgaacgcagcaacaatgctcattatgtaataaatgaaacttctgaaaactgtgaaatcaattgacggattatctatgtgccagaacaagaacacggctaaaaaagcgactgctgtataaatgaaaagatgaaccaaactaaactttttaggcttctttcttagccatagttgcacaggaacagcaaacaaaaagtaagtaataaatgcataaaaagcaatgataactacagtaaccaatgcaaatggcacaaaacccgagtatacaaacatatatagcccgaagatcaaaccatacgacaaacttgaaaaagccaatgtgtaagtatagctttgacttttgctccaagacgctgcttccatatagttcacctgctttttataaaaatacatttctcatttttttcctattgtttaaaatcagtatatatccatcactttaaaagatctatgtttttttggcagatcatcaattcactatcttaatatccaaattttaattgccattaaaaaaggtcaaggaaataccttgactgtgtatcgctcaccaatctgcatccggctcatcatgttcgaatccgtaaaagcctttaatccacacatctccgcagccggctccttttgtgatcaataagtaatgatttctgtttgcatcaccattcaccttatcagccgcgctcaagttcaaatgattatccgtgaaattctttttactaagggtaaaatcatatcctgccagtgtaattctctgcagtgcaagtcaaatatcgacagaaagattacgaccacaaattcaaagcattctgtgcatttggagactaccccccccatttaaacaccattcggatgacaaatgcatagctccctcaacttttgtagagacacttgtccgcaaaaaaatgtaagggttttcaaaaggagagcagtgtgctaaattgtaagataagtaaaaattttctgccaatattcgaaaggggtgcatgatttgaaagcagtagtagcaacaaaagacaaaagtatagcgatcgtacaaaaagaattacgtcctttacgacatggtgaagccaaagttaaaatggaatactgtggtgtatgtcatactgacttgcatgttaaaaatgctgatttcggggatgttactggcgtcactctaggtcatgagggaataggcattgtaactgagatcggtgaaggtgtaacaagtttgaaaaagggcgaccgcgtctctattgcctggatgtttgaaagctgcggctgctgtgaatattgcctaactggccgtgaaaccttgtgccgcgatgtaaaaaatgccggctatacagttgacggcgcaatggctgaagaagcaatcgtagcggttgattatgcaataaaggtgccggaaaatttagatcctgcagcagcaagcagcattacttgtgcaggtgtaacaacttataaagccgttaaagtcagtgaaattaagccaggtcaatggatcggtgtatttggagtcggcggtttaggcaacttggctgttcaatatgcaaaaaatgtctttaacgctaaagtgattgcgttcgacattagcgacgaaaaattgaattttgctaagagcttaggcgctgacgcggttgtaaacagtttaaacgaagaccccgtcgctaaagcaaaagaagtgactaacgatttagggcttgatgctgtggtcatcacggctgtctctaaaacccctttcaatcaagcgattgatgttgtaaaagcaggagctcgcgtagtcgctgtcggtttaccggtggacaaaatggatttagatattccccgtctcgtgttagatggaattcaggttgtaggttcattagtaggtaccagagaagacctgaaggaagcttttcaatttgctgcagacggtaaagttgtacctaaagtgacaaaacgcccgattgaagatgtgaatgatatttttgaagaaatggagcaaggtaaagtgaccggccgcatggttatcgattttacttcctaatcattaaggctgccgggaatgatacggcagcctttgatctcgattcttgctcggcgccccacccagactgaatgagactttgtcatttagttcagaaaagaagctctacagatcattcggcggttatgcattttgcaagtactctctgaactaatcctgataccaatataatgcaaggtcattcattgccgaagcgtagccctgctgtcttaacatagttgttatgctgccctgatgataagttccgtgattggcaacatggaataaaatttctgagtaagcagtttctctgtaacctaaccaagggttatttaagttcattttttgttctacatcggtttggctattcatccattcttcaaactgtgaagccagttcttcataagacgccgcaaattcatctgatattcaataaaacggctgttgaacctttgctatgtatacagcttcatcttcacaggcccaatttaatctgcataatagttcactgaatctttcaacaattttagataaacatcttctttttatagagatgttcgttcaatcgacatccttgtgatatatatggtaaaatttatagaaacaaaggagtgttgttacatatgagtcttatcattttagcatccatgcttttatggggtgcagtgatccacgagctaaacaaaccttcaaaaaagcaaagtaaacgaaaaatgatccctttggtatccctcagttctttatctactttaatcatcacaatttcgcttttttctaatttaattggttgatatttgttatgaggaaacccgccagaggttcctcataacactaaaaacctactcactgcactttttacagcagaccttatcagagtgtttgcttaacactttatccattctccccacaggcatcttcttctcactcggaagtgtaagataagctgttatctcatcccctgattttattgtttttccgcagatagagcattttaactcagtattaaagaaattttttaatcccattcagaagcctccttacttacctttataaagtaatacgttaatgctttataaaagtttcaggttaaagaaatattccttgcccgggaatatacttcgtttcagttgatccgcagccgtcccggtcatcgttatacctcactcaatcaggcaacttcttccttatatcctctacgacattaaatgcggggaaaacgttcattcaagaattcagcgttaaccaaaaaggagaatacatcctgaaatatgatagcggcaccggtgatagtgtcaatggtttctttagatctgttgagatctaaattccgttaggaaagtcggcagttttgccgactttcttttccaagcattctgcaggaataaaggtgaagtgtcgaataaacatatgacctttttgaaacggaaactttatcggcatcacaaacccgcaagcagcctccttgtatcgtaccttccgtccctttgtgatttgttttgatttgtcgtatactgcgcttgcccgggaaatgatgaatattttcgttaactataatttccctgtacctcttcgtatgtggctctgcatgatgaagtaacttcatggctcaccactttcatacacagttttattgcatgtttagccatatccctcctctttaaacagcaaaccgtcccatccatttctctctttcagttaacctcccattattttattgttttagaagctcttcattttagacataacattcattttttcttatttagacttaaatctatgtcgaattttatcgtccggcatattatgtactatcctaacaacaggaggtggcaataatatggggaactacggtggaaattatggcggaagctctttcgtattgatcgttgtgctgttcattttgttaatcattgtaggtgctgcattccttttctagcacattgacgatttatattcgtctcccaaacattgcatcccttagttcggacagacgccataagaagttttatggcgtttttactttttaaaaaaaccaatctgagataaacattttttatttttactctggtaagcgggagagtttcctcccctgcctgcgccaatattgccgctatgaagaatgaggcgaacaatccaaaaggtgttgtgatccattctttaaaaacgattccgaaaatcaacaattcgcaagcagttccatataaaatagctaaacctgtgattgcccattggcttatattcttatcgcctaaacaacctgatacatatccagtccaaccactcatcatgtttgatgatgggcccgttgtatcttctgcagacttttctctttcaaagacaccagacttatcttcatctttaacgccattaacccaataggtcattttgttttgaataaagacttgttcatgaacatagctcctaaataattgttactaaggcgtttttaattcatcggattacagatgttgtgaacttaaaaaggatattactcaccttcataaaaagatttagtcactgaagggctcacccacaaaatgcggtgttcacacattgagtcattttcacataaaaaaaccggattcctcctttaagaggttccggtcttttttagttaaaatgcgggaaatatctggtgacgtgctgcacacccccgctattataatatttcaatagagccttctgttccatgaacgcgtattcgctgcccatcttttatcaattgggttgcattttcaactccgacaactgcaggtaagccgtattcacgcgcgataaccgctccgtgggtcatcagtccgccaacttcagtgaccaggccttttatggatacaaacaatggtgtccagctgggatcagtataggaggtaactaatatatccccatcttccaaatcggcatcttccatgtttaaaataacccgtgcccgcccctctatgactcccgaggaaacgggcagccctgcaatcgctccggccgggagattttctcgtttgtactcgcctgtaacgatttcaccgtcagatgtgataacacgcggcggagatagtttttcatatacttggtactcgccttttcgtgtgctgatgatttggtaatccaatttatgtgtgcgtacgacttcctgaagttcttcaaaagtgagatagtatatgtcctctttttcatgaataacgcccgcttttgcgagttgttcggcttctttcagtaaagcctgcttataaacgaagtagcggctgatcatgccgtattttggatattctctgaacccgctgaagttccggatgatgcggatcattcgtttggtttctttggctttttgttcaccatccggtaattgcttcaatcggtctaataactcttgttctttcttcaacgcctcccgccgcccttgctcaaatttccgctggctggcatttggctcaaagtttttgagattattaagaatcatagggacaagtgcagttggtttttcgctccatcgagttcttgtcatatcaatttctccggcacatcgcattccgtacttgttgagataagcatagatagcgtcacgggtttcccgcccgccttcaaacgtcaccagcccatccaaaaagtgatcatcttttacattctctaaataggcaattacttctggataagggcggatcacatcggcgacgtccaatagcgcaagccccatttctgaagtaatattatggggtacagattgagaaagcgtatctgctgcgtttttttcacctaaccactcgttcattttttcgttaatccatgatgaagcatccattgcagttcgaatcaacaccgaactttttgggttaaatagaatcttctttaattccttgatatcttccaaaataaaacgaaataaatcagatcctgatttcgtctggatgttttgttttaactcttctatcgatgcttgactgctcttaatcaaatcagaaacaattgccggatcgttttcagcttgttccggcatatctgcattgcctttgccgggaatcggcgccgttttatcaggtatcggcttaatgaaatcatctcgctctattatggtcataagtgcgtcttttaagagcggatcgtgctgccccatgccttttaagaaaacttctctgacattaggggatgccagttgatgtgtgacatcaacgaatagccttccgccggctttacgcatgggtgcagcagtcgtcaacagaaaaaaagacaatccaaggggttttatgggatccgtcatcatttgctgatgaccaacagagatatagacgtgattttcttgatcgttcgcttcaggaacgggatataacgttgtgatcggacggctttggacaatataaaaagtatcgcggtccaaacaccattcgatatcttgcggctggccgaaatgagcttcgatctgtctcccgatacgtgccagctgtaaaatttgttcatcagtcagtgtttgaatcttttgctgatcaagagcgatctcctgtgtttctgttccgccttcttttcgtccatagatagccaattttttagtttctattctcttatcgacgatttgcccgtcctgtactttataacaatcggcagagactaagccggagaccagtgcttcaccaagtccaaaaccggcatcgatggatagcagctttcggtttccggtcatcggatcagcggtaaataaaattcccgaagcctgagggaacaccatcctttggatgataacggataaataaacttggctgtgttcaaacccatttttcatacggtaaatgacagcgcgatccgtaaatagggacgcccaacatttactgatatgctgcaagatcgtatctaagccggtaatatttaaataggtgtcttgttgaccggcaaaagaggcatgcggtaaatcctcagctgtcgcactggaacgtacggcataggcatgttcttcgccgaaccgggagagatggcaagcaactgctttgactacatctgaaggaatttctgcttccataatggtttgccggatttttttgctgacatcaccaatttgatcccgattctccactttcagcatggtcagttgatccaacagcgcttgtaacgtttcgttttgttcaatggctttttgatatcctgcggttgtgacacaaaatccttccggtacttgtattccttgaatttttgataattcccctaaatgtaacccttttcctccaacgagcaaaggctgtgttttttcaatttcgtgaatgccgagaaccaaagaactcattctatatctccccttcaaaaaaatttgacaagagcttttcagcatgatataatcataatataagatggatatctatgacttttcacaaagaaagcgcgcgtgttctgattatatcaccgtgtctgtttttgtgcaatataaaaagaacctggccaatttggcgaggttctttcttcatttttgtcgaaagctctttaaagctgtattgagatcttttgtgtgaacgtaaatgttcttatacaactcgaatagtgttttatatttttgaacattttgttcttttggataaaatgcagctgcttcatgaatgaactgctctgcacattcttcaagagagtcaaaccacccgcttccgaaggcagctaacatcgcagcccccatggcgggaccttgttcattctctaacttaacaaccctcgtattgaaaatatcagcctgcatttgaagccacgtttcatttttagctcccccgccaatagagacaaccgtatcaactgattttcccgcttcgcggaatagctcaattgattcatataaagagaatgtgatgccttccattatcgccctcaaaaagtgctctcttttatgggctccgtccattccgatcaagcttccccgaatagatgaatcagcatgcggcgttctttcaccgactaagtaaggagtgtacagcagtccatttgctcctatcggaacagattccaccccccgcaataattgttcaaacgattcgttcggcgcaaacgttcttttgaaccagtctaagctgtatccagcagcgagcgtgactcccatcgtataaaaagaatccttctttccatgattaaaaaagtgcactttccctttaaagtccctttctttgtcttcttcacaggaaagtatgactcctgacgtcccgatactgcataatgtttttccggaagaaagaataccggctccgacagcaccgcaagcattgtctgctcccccggcgtacacttttgttttttccaacagcccagtctccgccgcaacgctcggaagcagtgatcctacacagtcatgggattcaacaagcggaggacaaatttccgctgaaataccaaattgattgcaaatctcatcgctccactctttgcgggtcatatgtaaaagtaacgttcccgccgcatcggagtattcagtgtgaatggcgccagtcatgcggaatctcacatagtctttcggaagcaaaaaaacagcggttttgttaaaaagttcaggctcatgtgccttcacccataacattttaggtaatgtaaacccttcaaggacacggttttttgtgatatcaagcagatgatcgccaaatgtctcggtcatcctgctacattgaggcgtcgttctggtatcattccaaagaatcgcatgacgcaacacccgccgatcttggtcaagcagtactaacccatgcatttgtcctgaatagctaatcccgtcaatatccccggcttgaacgttggatatcgaaatcaattcagccaatgcttcaattgtttgctgcacccagtcttcaggattttgctcactatatcccgccttctcttggatgagcgggtaacttttggacgtttctgcacaaaccttgccgttttgattgactaaaatggttttaacggcactcgtaccaagatctattccaatgacatacttcattttttcactccttcctctctaaatagatccccattgaattgacccgccataacagtaacttcatgacgggccattccgggaacttggctgcctgcatctttttacagcgggatctggagcttcttttttcatttgttatacctgtaaaatgtattgatttaatatcgcttttaaccgctcctgtctccctgattcgtttttaattggctgattgttcagcgcatattgctcaagtgttttaaaatcagctcttccttctgcaatttcaagaccaatcccttcagtaaagctgcggtaacggtgttgaatcacatcttcaaacacacgatcttcgattaatttgtgggcggctttcaaccctcttgcaaatgtatccatccctgcaacatgggcatatagtaaatcatcaggctcaaaagaagatctcctgacctttgcgtcaaagtttaatcctccgcttccaagaccgccattttgcagaatttcgtacattgctaatgtcgcagaatataaatctgtcggaaattcatctgtgtcccagcctaaaagcggatcaccctgattcgcgtcaacagagccaagaaggccatgcactctcgccatgcgtaattcatgttcgaatgtatgcccggctaatgtggcatgattggcttcgagatttaatttaaaatgattgtctaagccatattgctttaaaaaggcaatggttgttgctgcgtccgtatcatattgatgggtggtcggctcttttggttttggttcaatcaaaaactgccctgtatacccgatttccttcgcataatccactgccatatgcataaatctggccatattatcaagctcaaattttaaatcggtatttaacaaagtttcgtacccttcacgtccgccccaaaatacatagttctcggcgccaagctcttttgctgtttctaatcctttttttacttgggctgcggcatacgcaaatacatctgcattacaagaagtcgccgcaccatggacgaaacggggattcgtaaacatgtttgcagtattccataatagcttaacgccgctggttctcatgtagtcttttatcatgtccacgattatatccagattttgatttgtctcttttaacgtacttccttccggtgcgatatcccggtcatgaaaagcaaaaaatggcgcatccagtttttcaaacagctcaaatgctgcatctaccctcgctctcgccagatccaagcctttatagtaatcccacggtctctgcatcgtagctgcgccaaaaatgtctgtgccgtcagcggtaaatgtatgccaataggcaatagaaaatcgcaaatgctctttcatcgtttttccgccaattacttcttgagaattatagtatttaaatgctaaaggattcgtggattctttcccttcgtaaatcactttgtttgcgctttcaaaatagttgaccgaaccggaatgagagtgagccatgtgtgatttcccccttaaaaataaattctaaacatgatcattcaaatacaaatgcttttatgtcatgttgcacattagtttgttgaccaaacaaactaacttattttcatcttatataacctcatcagtattttcaatattttttttagttttttacgaacacattagatataataaaggttggattcgctatgtactgcgtttcgcacgataacagagaacgttcaacttaatttaaagattatacaaatggagtggatgaagtggatatcgctgatcaagcctttgtcaaaaaagttaaccaaaagttattactaaacgaaatacttaagaattctcctatttcaagagcaaaattatctgaaatgaccggattaaataaatcaactgtttcgtcacaggtaaacacattaatgaaagaaaacctcgtatttgaaatcggtcagggacaatcaagcggaggcagaagacctgttatgcttgtttttaataaaaaagcaggatactccgtaggaatagatgttggcgtggattatgttaatggcattttaacagatcttgaagggacgatcgtccttgatcaacaccatcatttggaatgcaattctccagaaatcactaaagatattttaattgagatgattcatcactttattgcaaacatgccgcaatctccatacgctcttattggtatagggatatgcgcgcccgggctgattgacaaaaatcaaaaaattgttttcgctccgaacgccaactggagagatattgacttaaaatctttcatccaaaagaagttcaatgtgcccgtttttattgaaaatgaggcaaatgccggcgcatacggagaaaaagtatttggagctgcaaaaaatcacgataacatcatttatgcaagtatcggtacaggaatagggatcggcgttatgatcaacaatcatttatatagaggggttggcggattctctggagaaatgggacatatgacaatagactttaagggtcctaaatgcagctgcggaaaccgaggctgctgggaattgtatgcttcagagaaggctttattaacatctcttcagacgaaagagaaaaaagtgtccagccaagatatcatagaccttgcccatctgaatgatgttggaactttacaggcattacagaattttggtttctatttaggaataggcctgaccaatattttaaatacatttaatccgcaagccatcattttaagaaacagcatcattgaatcgcatcctatggttttacattcaattaaaagcgaagtgtcatccagggtttattcccaactagacaatagctatgaattattaccatctatcttaggaaaaaatgcccctgctctaggaatgtcctctattgttattgatcattttctcgacatggttcataactgaatgtacatacttctatgttttacgctcatctttaaagatgggtttttttattctaggagtatttctgaatcaatactgacataggcaccttctaatatgaaaaaggagttctaaaatagaaatctcctttttcatgtgctaattatttttctttataacgaaaatatctgaagtcggccggaatatgatgaccgctcgtatcttggcattgcatccctacaaaagctcctgtaaagaatcccccgccgcggatgtaatcatctgataattttttcgattctaatgcaatgtcgattttgtgccaatcttctttgttaaatgaatacaaataataatatttttcgttttcaatattcacttttaaatagacatacttgacttcacgaggaatcacaattttattttttaacggttgtgaaaaagaaaagttatcacatatcgttaattcaagaatacggccaagttcttcatcatacgtgacttgaagagccgtccagttctctgtattgtaatagttcaccaaaccagcggcttgctgaaaattttccggataaaacgcaacagccgtttccgcttcaaaatggaggctttgccagcgtctggctacaaatgcctgagtaaatgtcgaagttaaggattcatggccatataatcgtaaatgatttggcgcttgagttaatgaacctaatttctccgtaaacgggattcttaacgtttgaaaattaatatttaatgttgcatcctcaaattcatcaacttccggataggtttcttcaaacattgtttctggtatagaaggcgcatccacttccaagctcccttcttttccgccttctacataaggccagccatctttccaatagagcttttgaatagctgtttctctgcccagaggacaatatcctctctgctgaaaaattgaatcatcgtccggatgaatgggacgtcccgttaaatgagctaaataccactcacctgtatgtgtttgtacaatggatgcatgtccgcatttttgcagcggattttccggcgcatgccatgacgttaagattggattatcaggatgtacttcatatgggccttcaatatttgcagaacgggcaattgtagcagcatgttcgaaccgtgttcctccttctgcggttaataaataataatagttcccgatacggtaaaggtgcggcgcttctgtcagctttctttcagttcctttaaaaatcactttcggtttaccgattagtttttgctccttatcagaatattcctgcatgacaatgcctccaaaggagtgccgatcaatacgctgatcccataacatatttaataaatattttttcccatccgtatcatggaacaaagaagcatcaaaacccgagctgtttaatgtgatcggctccctccaatcaccatcaatcgtgtcacaagtcactaaataattgtggcaatctttccaggcgccatctacaaccttaacatccgtatagatcagccaaaactttccgtcgctgtaacttaaacatggcgcccagaccccgcctgaattaggatttcctttcatgtctaattgcgaaactctctgtaatggatgtgcaactaagtgccaattgactaaatcttttgagtggtgtatctggactcccggaaaccactcaaatgtagatacagcgatataataatcctctccaaccctgcaaatactcggatcggggttgaatcctttaagtactggattgatgatcttcattttgaactcctcctcagctattttctgttgactcatcatgttttaagctttgaaatcgtcaatatgatccaaataaactttgtctctattctctaattctcgaaccatgcttttatattttttctcatctaagttatagaaattaatatcaatcatggccagaaccagtaagaacacgggaataatggttgttgtaattaaaattcccgtcaatgcctccggcgtttgcacctgatttgccacatatccaaactgatctagaaccaaacccggtacaacccctcccaaggccatgccgaatttaaagaaaaatccgataatagcgtatatgagaccgcccattcttttcccggtcttatactctccatattcaattgtttcaggaataagcgcccacatatatcccccggcagtgagacttcctgcagcagccagcaatcgaaaggaaagtatcaggaatacattacttgacggaacgaaaagtaaagctaagaggccgatcatattcagtaataatgcatagtttagtaatttcttcttccctaataattgatgaagctttggaataaacggtaaaatgaccaaagcaggcaaacttcccaacaaaccgtaccacttcactaaatccgctctttctaaattatacgttacgtaatagatgccaaccgaattactgattgaattcactccaaaaataataataaagaaaatacttaatacaactagaggccgattaacacgaaattgctcaaatatatccgaaaatttaattttttcttccgatttttgaagcgtgacacgctcttttgtgcttttaaaacaaaagattaaaaggcacccgcctataactcccataatacccatggttagctgccagccaagagattcgctgccggaattatcgcttaaataagcagccagtaagggaacaaaaaatgcaacgacaagtcctccaagattcgcaaataacatacggacagacgttatactaacaacttcttgattatttctggtcattgcagatgttaacgcgccatatggcacgtttatcatggtgtatgtaagcgataagccgacataggtgatataggcatatattaatttccccatatccgaaaaatccggggttgtaaaacagagtattgccaatatgacaaagggaaaagctccgaataaaagatacggtctgaagcggccaaacctgctatttgttctgtcaactattgttccaataaaaggatcagcgagagcgtcgatgattctaaccactaaaaacatcgtaccggctgttgctgccgataaaccaaaaacatctgtatagaagaacaaaagatacgtagacactgttgcataaattaaattacatgcaaaatctccagacgcatatccaactttttcaaccatgctgatcttctttacattttcactgagcatgatttctccccttttcgatcctttacataaggaacatgatgaaatggtataacatttctttaaaattatcggccagtgagcggcatataaaagcgctttcaaaaaaatgatagcggtttactttcacagagcattttcaacatccaaatggtgatcagatagcagtgaacaggataaaagcttggctttcgctttttatatacctccaattaaatcgagcctcttatccccctcccatttaagacctttacatgatggacaattaaagtggttttattagtttgttgatcgaacaaactaacttgatttcatattataaaatcttttctgctttttcaactcttttttcagagaatttaaaaccgaccaaaggacataccatgttgtaattgccgactgcttcgacagacgttaagtaaaccccctgtgtcacctgactgatttattaaatgataagcacttccatcatcttttgtttagaaaaacttattaagaaacatgcacttgaaaaaatgcgaatcatatataagtgatatcccgtttaattggttgaggaggatattatgaaacctatgctgccttttgaaaaatattttggggatttagaactgatttatgcattttatggagctatgcctaccggtgttactgtttcagaaactggtcgtattttcatttgttttccgaaatggggagacgatgttaaatttacggtggcggagataattggggataaattgcagccttatcctgatttacaaaccaatttggttaaccctgagaatatcaaaatgactttcatcagtgtccaaagtgtagttactgatggaagaggaacgctttgggtactagatacggcggcacccaatttttctgaaccaattaaaggcggggcaaaattagtcgctgttgatttaaaaaccaatacaatcagaagagtttatacctttacagaagatgttgtccttccaacaacttacctgaatgatgtccgatttgattttcgtgttggaactgcaggttatgcctatataacggattcttcttccaaaggaccaggagctattatcgtcgtggatttagaaaccggaaacgcatttagacggttaaatggagcaaatccaacttcaccggattcctattttataccgaaaatagaaggcaaaattttgatgaatcgtaacagggatggttcaacttccccatttaggctggcatccgacggtattgcgatttctcctgacggaaaggtattatttttttgtccactgaccagccgtcatctgttctcgatctcaacagaagccctgagagatagaaatataccggacatggatttactttatcatgtggcgtattggggagaaaaaggcgcgtctgatggaatgattacagatgcgaaaggagccatttatgccggagattatgagaacaatagtattcgaaagatgctgccgaatggcacaatggaaaccatcgcacatgatccgagaattttatggccggatactttttcgattggtccggatgaatacttatatgtcatcgtgaaccaattacatcggcaggctagatttcattatggaaaagacttacgacagaaaccttatagtttacttcgtatcaaaattgatgaatttcctgctcctgctttttgaaaataaaaatggccggttcaattttagaacataattagcttcatttagccttcatcctaaaccgaataaggggttacaataaatacgtgtcctcaattataacttcaattttttttggtcatattctggtcaaggaccaaaaatgttgttcttttaatcttatgaccaaaaccaaaaaatcccctggcaccaatagtgccaagggattgagagattaatactgagacatgtattgttcgcgctcccacggatgaacctgtgtgcggaacatatcccattcgatttcttttgcttcgatgaagtgttcgaacaggtgctcaccgagtgccgcaaccatgacttcgtttgatttgaattcgtcgagagcttccgccagcgtcgccggaagatctacgatgccgttttccatgcgctcttctttgctcatgacgtagatgttgcggtcaatcggagccggtgcttcaagtttgtttttgattccgtcaaggcctgctgcaagcaatacgcttaacgccaggtacgggtttgccgccgggtctacgctgcggacttcaacacgcgtgctgatgccgcgggaagccgggatacggatcagcgggcttctgttttgcgcgctccatgccacgtagcaaggtgcttcatagcccggaacaaggcgtttgtaagagttcactgtcgggtttgtgacagccgtaaagcttgtcgcgtgttttacgataccggcaatgaaatgttttgctgtttcactcagctgaagatcagcgtctttatcaaagaacgcgttaacgctatctttaaagagtgataggttgcagtgcataccggaaccgtttacgccgaacagcggttttggcatgaatgtcgcatgcagaccgtgtttgcgggcgatcgttttgacaaccagtttgaaagtttggatgtcgtcacaagaacggatggcaccagcatatttaaaatcgatttcgtgctgacccggagcaacttcatggtgagatgcttcgatttcaaagcccatttcttcaagctcaagcacgatatcgcggcggcagttttctcccaagtcagtcggagccaggtcgaagtatccgcctttatcgttcaattcaagcgtcggttcgcctttttcatctaatttaaacaggaagaattcaggctcaggtccaagattgaaatcgctgaaaccgagttctttcatttctttcagaatccgtttgaggttgttacgcgggtcaccttcgaacggcgtgccgtccggattgtaaatgtcacagatgaagcgtgctactttacctttttcagccgtccatgggaagattacaaatgtgttcagatcaggatataagtacatatcagactcttcgatacggacgaaaccttcgatggaagaaccgtcgaacatgcatttattatcaagtgctttttcaagctggctcacaggaatttccacgtttttaatcgttccgagaatgtctgtgaattgaaggcggatatactttacgttttcctcatttactaattttacgatgtcttctcttgtgtactttgccatttcgtaaaactcctcctctaaaaggtaaatgtatatagcaaaacagttgctaacggattaatgaaagaatcgggacatgtcaccttggcggaaagtatttccccgctggaaacggcctgcctgcatcagttcgtttttcagaagctttctgagttcgtcatcagacagattgtgcttcatcggtttggcggttttttcggatttttcttccggttcggcagatgccttatccagaatttgtttgatccccgccatattgacgccttgttcaatcagatttttgatttctaacagtttatctacatcatggaatgaaaataatcgtctatttccttcgcttctcgctggaaatatcaatccattttcctcataatatcgaatttgccgggcagaaagttctgttaactgcatgacaatcccaattggaaataaaggcattgagcggcgaatgttatcactcatctcaatttcctccttttcttatcttagtctcattataggtgatgttatattttgtgtcaacacaatgtaaggaatcttaacatcaaattctttgaaaattgcaaacggcctaaatcagctctttttccattaaagcatttacggcgctgcaaatcgcatttttcacgtgcgcgtaggttaatcctccttggacatacgcgacataaggcggtctgataggtccatctgctgataattcaatgcttgctccctgtacgaaagtgcccgctgccataatgacatcgtcttcatatcccggcatatagctcggataaggcgtcacatgcgcattaatcggtgaagcatattgtatcgcctggcaaaaagcgatcatcttatcagggtcctgaaactcaactgattgaatcagatccgttctcggcgcattccatgcagggtttgacgtaaagccgagcttttcaagaaaacgggcggtaaataccgctcccttcaagctttgcgccactacatgcggagcgagaaagaaaccttgatacatttcctgcagtgaataaagcgaagcgccggcttcacttccgattcccggggaggtcatccggtaagagcaggcctcaatccacttggctttccctacaagatagccgcccgttttagcaaggccgccgcccgggtttttgatcagggagccggccataagatccgctccgacgtggcagggttcccgctcttctgcaaattctccgtagcaattgtccacaaaaacaatgacatcttctttgatttcctttacgaaacgaatcatctctttaatttcatttattctgaaagacggacgattcgcatatccttttgaacgctggatgccgatcacttttgtattcggccggattgcagcccggaccgcttcaaagtccactctgccttctgatgttaaatcgactgcattgtatccgatttgaaattccttaagcgagcctgaatactccccgcctcttactccgacgatttcctcgagtgtatcgtaaggcttgcctgttatataaagcaattcgtccccgggtctcagcacaccgaagagcgcgattgaaatcgcatgcgttccggaaatgatttgcggccgcacgagtcccgcctctcctccgaacacatcagcatagatcttctccagtgtatctcgtccgatatcatcataaccgtatccggttgaaggcgtaaaatgcgtatcgcttactttatgttttctgtagctttgcaggactctccattcattccgttcactgatttcttctattcttttatgaacggcggagatttccgcttctgtttcttcggcggttttttgtaaaagagcgccatgggtcagtgtgtcaaacatgttgtgtataccttccttacatgaatttcttcagttctccgagtatgctttgttcttcctgtacataacctgagacttcgtagcgttcattttcttcattaaaataaaggctgtcgatcatggtctctgatttgatgcgtgacatcaatttgccttcggcggcaggcacatgaacttcatacggcgtcatcagctcccggcgcaaataagcttcgatttccgcttttagttttgcttcatccccggcgattctggcgctgatcatgatgtggccttctcccgctgtcgggatgaagtcaggaagtgtatcatcacgtttgttataagcggtcagcaccggaatatcatctgcctcaagctcttttaacagaccgaggacagtctgttcatgtccggcataatcttcattggatgaatcaatgacatgaatgatcaagtctgcttccttcacttcctcaagcgttgagcggaaagccgcaatcagcgtcgtcggcaggtcctgaatgaagccgaccgtatcagacaaaaggacgctgtagccgcttgggagcgccatctttctcgtcatcggatcaagtgttgcaaacagcagatcttcttcaaagctgtctgagcttgttaattgattgaaccatgttgattttccggcgttggtataaccgacgagtgcagcctgaagcacgccgttctttttacgtctctcccgataacggcttctgtggcggataaccgttgaaagctgcacgttaatttcgtgtatgcggtttctaatgtggcgccggtctgtttcaagctttgtctcaccaggccctctcgtcccgattccgccgccttgtcttgagagattgattccttgtccgcttagacggggcagcgcgtattgaagctgggccaattcgatctgaagctttccttctctcgtcttcgctctttttgcgaaaatatccaaaataagctgcgtgcggtcgatgatcttcgcttcaattgcagtggcgagtgatttaagctggctcggtgacagttcatcattaagaatgatcagatccgcttcaagctcttcacacagcgccttcagctcgtctactttccccttgcctatatatgtagcggcatccgctctgttccgtttttgcgtaatccgggtcagcaccgttccgtcagccgtttttgtcaatgaagcaagctcttccatggaatgttcaaagtgctcatctgtcatgtgcggaagctggcagccgaccaaaatgaccgtttctttttttccttcctgttcgttcaaatggatgttcctttctgtgtcgtattgggcagtagtactatcataccaaacccgcagggcgtataccacacatccggcgggttttaaagagagaaataaaaaagagacccctcaaaccggctgagaggtctattcgtaagctgccgcctcatcttttataagtaaatcctggctcttgatcgtcattaaatcgttttttaagtattggtctcccattaaaagtctcatggcctgagcgcggattgatttttcaatcacgtttctgacaaagcgcccgttgctgaatttaatggggcttgtcgtgcttttcactgtcattaagtaatcttttaacttccactcggcttcctggcttaattgatactcccgctctgctatcatgcgctttgcgatgtccatcagctgagtgacagagtaatccggaaaatcaatgctgatagggaaacgcgattgcaggccgggatttaatgacaggaaatgtgtcatttctctcgagtaccctgccaggatcagaataaattcatgctgtttgtcttccatatgcttgacaagcgtatcaatcgcctctttaccgaaatccttttctccgccccttgcaagtgagtatgcttcatcaatgaataaaatgcccccgagcgattttttaatcagatctctggttttttgcgccgtgtgtccgatgtattcaccgaccagatcggcacgttccgcttcgatcagatgtcctttggaaagcacgttcatttcgaagaaaagcttgccgatcagtctcgcaacggtggttttcccggtgccagggttccctttgaacatcatatgaagagcttgttttccgactttcagcccttgttcggcccgtttttggttgacgaatatccacgcgtaaatttctttaatgttgcgtttcatttcttccatacccactaatgtgttcatttctttttcaatttctttcagaatgctgtgtttggcttcatttttttgcagggcggcctgatattccgcctcagcttctgcatttgtcagcacttgcttttggccattaagaatgatgttaatttgtccgttatttttataggttacagcgcgctccaacatgctcacctctctgttctctctttatcttactcatgatgaagcggttccgtgacatccgcctatcatcatgagacccgttttcctctttatctgtcactttttccgttctcttcgggaatgatgttgaatcctgcgctttcccgagaaatatttttcatttcttattgtattcaacagaaacgggaggacaaaccatttatttttattttccgggaaatgttgggtatatttctcatttttttcatgaatgacagccgtacaagcaccttttgaatatcatcatatgctgtaatgaggtgatggagaatggttaaaatttttatagaccccggtcatggcggaactgattcaggtgcaaccggaaacggacttcaggaaaaagcggtcacgctggagatcgcgctggctttgcgcacgattctgacgaatgagtatgaaggagtttctgtcacgatgagcaggacaagcgataagacggtcagcctgacggaaagaacggatgccgccaacagctggggcgcagattattttttatccattcatattaactcaggaggcggaaccggattcgaaagctatatttaccccggtgtcggagcgccgacctcgacttaccaatcagccgtccacacgcaagtgattcaagcatcgggttttaatgaccgaggaaaaaaaacagccaacttccatgtgctgcgggagacaagtatgccggcgattttgacggagaatggttttgttgatacgtcagctgatgcaaacaaactgaaaacagccagttttattgaaagccttgcaagaggacatgccaagggcttggagcaagctttcggtctaaaaaaaaaggctgacttatataaagtgcaaatcggtgcattcaaagtgaaagcaaatgctgatgcgcttgccgccgatgcggagtctaaaggttttgacgcgattgtgcttccaaaaggcggcttatttaaagtgcagatcggcgcattctcttccagagattacgctgaagcgttggccgcgcgggccgaaaaagccggatttgatgccttcattatacaagactaaatgaaaaacccccgctctcccttttttgggacgaacgggggttttttgttattgaagtatatcggcgacaaactgagaccaagcttcaagacgctgatacacattttcctctttcagttcgctcagtttcatccagcggccggcgatttgatctttttctttcacttcgacttgtgccgcagacgctaactggagcgcagaaaggatgccgatatgcaccttccctacatcgttttcatcatcattgatcaggccgagtgtgacaatgttttgtttgtcctcctcgcgaatgtacagttcttccgccagctcccggtcggtattctgtttcagcacttccgaaaatgaagccgctccttccatagggttcatgtgtccgccgaagccgagagaaagcttattatggaggcgcgattcccctccgccggcgagccgttcatacacaaacacctcatcatcgcggcggatgacgacatacggaatcggctgtttaaatcgcgggtcctcttccgcgtcgcctcttctgatttcaaaaaaatgcgcctcaatttgagccataatgtttacgatacgttcatcctcgctgttgactccctgaaatgtcagcatttcgttttgaaagacgtcactccgcggtgcagccaagatgatttcatccattttattcatgcccgttcctcctgtcttacctctccattcaagccaaaagagcagatattatatctgctcttcatcttggccaaaataaaaatcttcgtccttaatcggttctaccgtcgcctttttgtagccgttccctttcatggagaagaaatcatgtgattttgttttggtgtttaatccgtttaatacgatcggattaatatcctcttcttcaaagtaaggatcgaaccctaagttcatcaaagctttattggcgttatagcggatgaatttctttacatcgtgtgagagtccgacttgatcgtacaagtcctctgtatattcaagctcattgtgataaagctcttctaaaagctcaaccgcaaattcgcgaagttccgcttttttcgcttctgtttgtttattgtatatttcttgggcaagcagtccgacatatacaccgtggatcgcttcatcacgaaggatcaggttgataatttcaccgctatgcatcagttttccttgtccgtagaaatataacggataatagaaaccgctgtagaataggaagctttctaaatacacagatgcaaccatggctttgaacagtgaaatctcgtcatcttttttaatcgctttgtagagtccgacgatgatttgcgcttttttctgcaaaaatttgttttgtttgacccattcgaatacttcattaattgtttcagtcggtgccagtgtcatgaaaatattagagtacgattttgcgtgaacggcgttctccatcatcgccataaaattcagcacggctttccgctggtggccgtctacgtgttcagccacgatcggcattcctgtattcccctgctctgtatcaagaagagtcaatccggccagtaccttcatatacgtgtcttgctcgtttttcccgaggtacttccatgtgaggatatcgccgtttaaagcaatctcttccggaagccagaactgtttcacattttggttatagaacatttgggtaaagtcgtcttcatgctttgaccagtttgctgcgtcataaattttcgtcactataaactctcctttaatcaaacaacacaagaaaggcagctatcttgcccggtatctttcgttcttgcatagtaaatggttttgatgcctctatggtgggcatacagatcaatacggttcagatcacgagttgtcatcgtatctttcaaaaacagggtaaagctgattccctgatcgatatgctgctggattgtcgcgatcatatccaccactttgaacatgtccatatcataagcttctttgtagaagaaccagttattagacgctaatcccggcatcgggtaatacgtttttgaatttccgtatgttctttcttcgatccgttccatgatcggcataacggacgccgtgctggattggacgtaggaaatggagcctgtcggcgcgatgcacagtctgtagctgtgatacataccgtgttcagcgacaaacgccttcagctctttccagtcttcgattgtcggaatgtgcatgccctcaaagagcgcagcgattttttcgtatgccggtgagaactctttttcgatgtatttattgaaatattctcccgttgcataagtggagccttcataatgctcaaacgtttcgcctttttctttcgcaagctcagctgaacgctggatggaataaaagttcaccatcataaagaacgtattcgcgaaatctcttgcttccgggctttcataagcgatgccgttttgggcaaggtagccgtggaggttcatggcgcctaaaccgatcgacttcatcgctttgttcgcgcgtctgactgccggcgcgttgcggatatccgtcgtctcagatacatgagtcagggaatccgtcgcgagtttcaccgtgcgctcaatcgatttatgtttcatgacattcaaaatatttaatgaaccaaggttgcaggaaatgtccaagccgatttcgtcttcttcatcataatctgtgtaagccgaaacttgtgacgcttgaagcacttcagagcaaaggttcgagaatttcacttttgatacgtggttattcgcgtgctctttgtttacgttgtcctggaacataatgtacggataacctgactcagaacggagaacggcaagcttttcaagcaatttgcgcgcattcactttttcttttttgacacgcgggttgtcgacaagctcctcatacatcgccgtcatgtccatttcgtccatatgctggccgtattctttataaatcgtatgcggatagaatacataagccgctttgtcctcacgtgcaagctcaacgaacttatccggaatgacgacaccgatagaaagcgtcttgacgcgcacatcttcatccgcagaaatctttttcgtatcaagaaaatcattgatatcgcggtggaaaatgtttaaatacgccgcgcccgagccttgtctctgtcccatttggtcagcgtaacggaacgcattatcaagaagcttcatgacgcctacaacgccttttgtggcgttttcaacatctttaatcgcttcgcctttcgcgcgaagcttggacaggttaagagaaaccccgccgcccaatttagacagctgcatggaaatatcgatcgcccgtgaaatatcgtttaaggaatcattgacttcgagcaagaagcagctcaccagttctccgcggcgttttctgccggcattcaaaaatgtcggtgtactcggctgatattcctggttgatcatcaggtttacatattcttttgctttctcagtatcgccgtttgcgaagaacagcgcgacgattgagattcggtcctcataacgctcgaggattcttttcttgtcattcgttttcaaagcatagtcattataaaatttaaacgcactcatgaaggaaggaaaacgaaacttctttgcgtaagctgtcttaaacacttctttaatgtcttcaaaagagtaaaggcttaagaattcctcttcgtagtattggttttcaatcaaataatccagcttctcttttaaatcgtgaaagtaaactgtgttttgattgatatagtcaacaaaatagctatgtacagcctctttatctttatcaaactggaattttccatcttgttggatcatgatttcgttatttaactggatccattttggcacttgattttgtgacaactctttctacctcctgagtaaacaattcaacgtctttagatgtgccgctgagttcaaatttgtgcaagatcggcacctgatattgtctcgaaatggtatcggcgctttttgcaaagttatcgccccatactttgttgccgctcgcagcgactcctaataagagatgggcgtatttttcgagaaatgattgtgttgatgccggtacctggccgaagtttgtcgtgtatgtgaccaaaacaaacggagtgtccacgtggtccgtttcgtccaccttgcggatcagctgaaagtctgttttattcacaaaacgctgaacattccctgtctttgaatcaaatatgatttgaaccatccttatcacgacctatcaaaaataatgaatctcttaacactatatatagtatactaacctctcagaaaaacacaacatattgagatcgatttataaaaaattcatatttttgaaagagcggactttggctctggcccgattaacgcccaaaaaagagagcagaacgagaatcatctctcatcctactcaaggtgtcatgtgtaagccgatgtctatcataacatgaaaaaaaactgcttagtagtctagacttttattcttattttttgtaagaatcacattttttttcgctttcaacggtttcttcaatctccacatcagcaccgatttctttcagtacggctttcagagcgcttgtgatggaagcctctctgatcagttctttgccgtcaacgatgatgctggttccatattcatagcaggaatcatcttcacaagtttcttcccaatggttgattatcaccttgtgtttcaatcgtctcaccctctgcatgatcaatgtcagtacttagtgtagcttgtgcggcccgctttgtaaattcgaacgcttgtgaaatttattcaagctcatccagcgccgtttcttttttcagttcgattttattcgttttttcatcatagcggtatatttttaagtaaccgtcctcgacgatgccgaaacgattatgttccagctgcaccatgccttctgtctgcggttcggcatccgatgagccgccgtcatcatccgtcaccaccgtctcatgattgctgcaagctccaaacagcaaaaaaacagcgatccaaacgagcgtaatcctgattcttctcagttcattttcactttcgaacacgattttccgaacccccttttatgtttccgatatacggcctgcaatatacagatgcgcatagaaaaagaccattgttcatggtctttttcaaaaagtctattcaagctcaagctggacgtttttttgcggggcgaacgtggagatggcatgtttataaataagctgctgcttcccctccgtttcgagcaaaacggtaaagttgtcaaagccttttacctggccgcgaagctggaagccgttgagtaaaaacaccgtgacgaacgtattgtcttttcggatttgattcaaaaactgatcttgaatattaatcggtttcatgtttcgtcctccttggttctcaatacaatactgtttcgattaaatttccagttttcctgctatgcactcgaaaatttccttttttttctgctcaatatcaacaggcggcgtcatatctgtccatgaaacgggcattttattgcgaaaccaggtcagctggcgtttcgcatatcgcctagaattttgttttaattgctccacagcctgagggagcggcacttttccatcaagatattcatacagctctttatagccgatcgcctgaatcgattggctgtcccggatattcatatcatacagccgctttacttcgtcaagaaggccggtttccagcatcaggtcaacgcgctcgttaatccggccgtacagcacttctctgtccattgtaagaccgataagaaccgcattgtaaagcagctcccgtttttgggttttaagatgctctgacattgtttttcccgatacatgcagaatttcgagcgcgcggatgactcttcgcgtgttgttttgatgaatggctgccgccgcttccgggtcggctgccgcaagcttggcatgaagcgcttccgccccttcttcagccgccagtttctccatgcgctcccggaatacagggtcgccggagttttccgtgaacgtatagtcatacagcacggactgaatgtacagacccgttcccccgacaatcatcggcagctttcctctatcggcaatctcggtgatttttccccttaccattttctgataatccgccgttgaaaaagtgtcggacggctccaaaatatcaatcaggtgatgcggcacgccttctgtctcttcttcggtgactttggccgttccgatgtccatccctttatatacctgcatggaatctccgctgatgatttccgcattcagcattttcgcgagtccgatgcttagttttgtttttccgactgccgtcggtccgacaagtatgacgacaggctgttttttatttttcaatatgtatcactctcttttataaatctccccctaattatagcattcatttcttcaggcacctatccattttgccctttttcctgagcgctaaacgtccgctaccacccgatcggctcgtttccgacaacctctctcgtttttcctttgagcgtatggcggtgcgttttccgtccttcctcccacggatcgtaaacgacaccgccgtgctggatctgaatcggctcattgtaggcggcaaaggtggtctctgaaagctcatggtaatgtgttccgtcaaccctcgggatggcagggccggaaatgccgtaatacctatgaaaatggccgttttcaaacgaggtgatgcccgtatagaaatgtgtatgctcatctgtattgctgccgttctccggttgcgaaaagccttcgatcacatggtaatgtccctgcactacatccgtaacagcccggtatgcgtgtgtgtgcggaggtttttttgaccaatctgactgatacaggcccacaaaagctcactcctttatttttttgataaacgcccaatcaaaaattggtgggctgaatactctgttatcatctcaaatttattcttggaggtacctaaattatgaatgaagaatacacatacgaagcagatagtgatatgagacagtttggacggcccggatttgggttcggacggccgggattcgggttcgggcgtcccggattcggattcggcttcggacggccgggttttggttttggccggccttggtttggccgcccttggtttggcgggttcggacggccgtttggtttttacggcggaccgtttgtcggagggcttgtcggggggcttgtcggaagcgctttgttcaatccgtatttgtacggaggttacggctacccttactatccgtattactactaagacaatcaaaaagggctcctttcaggggcctttttgtataggcctaatgtcttgacttggcgggcaaagttcggatattattttattttactgccttaaacaaaaggcataaggattatgatgagagggggatttgatatgattctgggttatatcttcctcacaattgctattttatcagagtcaatcggcgcggccatgctgaaggtctcccgcggatttacgcggtttttgccgagcgcgcttgtagtggcaggctattcattggccttttatatgctttcactgacactgaatctcattccgcttagcttatcctatgcaacatggagcggagccggaacggtgctcgcatccattatcggagcgaaatggtttcatgaaaaactggacaagcaggccgtcatcggactctttttcttattggccggtgtcattttgatgaattggtagaaaggagaggcatgctgatgaaaggattactttgcttggcattagccattgtatcagaagtgttcgggagcacgatgctgaagctgtcggacggttttacgcacctgtggcccgctctcggcgtcatcgccggaatcggagcctcttttatgtttttgagcttctctttgaaaagccttgatttatccgccgcatacgcgacatggtcaggtgtcggcaccgctttaacggcaattgtcggcttttttgtttttaaggaggccatgacagtcaaaatgatgatcgggcttgttttggtcatcacgggcgtcatcctgctgaaccgttccaagtctcaaaaagctaaaaaaaatcaaacggcccggagctgaccgtttgaactcgtcaagcgcgggcagcttttacttcaacctcaagctccatctccacgtttccttggaccgctcgtgaaatcatacatgaggactctgctttttgcgctaacttcctggcgagcataaagtccgtttcggctgcatccggctttaataatataaacgggcggtgaatgattttctggtacgtgaacacaccgtttgtgacgtctacaattccttcagattccatatgtagatcttctttatccaagccgcttctttccatcatcgccgcaagcgttataatataacaggtcgcggccgctccaagcagcatttcatcaggatttgtgccttctccgggtccgtccatttccttaggaatggacacagccgtttccagccggccgcttttaatatcgccgacgtcattgcgatttccgggccaatttgcttttaaataaaagtgatgttttgccaagggacaaacctcctttttttcagtttactcatctttcactcgtttgtctttttttaagcttacgaatactcttgattgatcactctttttatcgtacggacaaaccggtaaaattcctccgtttttgtgaattccctttcgcggtaatcaaaattatcaaaaaacgcttcccgctgttctctgctgatctcaagctgtatgctcagcccggtttgcgcctggttattgatattttcggtgtcaaccccggccagaccggtttttgaggttgccaattctgcagaaaatccgtttcgttcgagagctctcaccaattttttcgcccgcttccggtcgcttcctccgacaagagtatttttctcgtcgcctttataaccgtgaactgcgataacataatggtgctgcttaatgctttcgactgctgaaggctcatcgaacctggtgctcgtaatatgaagagtctggttatcatgcgtttttaatccctcaaacagataggttgaataatcatctctgaaagagcggacgatctcgctcaccccgccctcaattctccctccgtgcggcgacatgatcaatacggggctcccctttcgcttattgtacgatatatgataatcatcggggtcttcatgttcagccaaatctttaaaatctgtgtatgtatcagaagaattcgagggatcagggtctgacgcataatgagcacatcttattagtaagaccattgctacgataatgatgacattaagtaaaattcttttcatcagctctccttctttgctcctttctgaaaaatgacatgttcattatatggatttttgtcaataggtcttatcttaacattctattaacattatcatcagtgaaaaacttcccggtttcgaaaaatcaatggattgtcacggttcaagcgctcaaatgccgggcatcagtgaaaaaaggttgagagagggcaaaaaaaaagggaggaacgcccgaattttcaggggcgggagattcacggccggaaacggacggcatcaggaatacgcttttaaaaatgaatatccgcctcccgaagcaaatgcacaggacagaatggagcccgtcaaaaaagttctcatctgcctttttgtacagcaaaatgccgttacagcccgctcatcccctttttttatcataatggtccgttttgaaatggagccgtcttttttcatatatataatatcaatcggaagctgtttttccaaggaatgtctcaatattatgttcatatatatacctccttccgccggcttcactataaacgaacaaacgttccgtttcaactcgatttcttctcctgaaaaagccgcaagtaaccagcgctcctgaaggacaaacaaactgaccgaacatacggcctgttcatatggtatagagagaatcgccagaatgggaggaaaagtatatatgtttggttactcaatggtacaaatggtgcggtcaaatgctcataagctggactggccgctcagagaaaacgtattacagttatataaacctttcaaatggacaccttgctttttgcacaagtttttcgaaaaaaaggtgaaaaacagaaagaaaatgtcagtcatcattgaatttgaagagggctgccatgaatccggttttcacagcacaggacaggtcttatcaaaagaaaaacgctgcaccataaaaaagcagtttcaaacaatcaattgctgcagcgccgaagtcactccgtccgcccttcacatgcttctttcgcaatgccgggatatccgtaaaatctatttaaaccgtgaagtaaaagcgctccttgatacggcagctgaatcgtctcatgcaaaagaagtgacccgtaacggcaccgtattaacaggaaaaggcgtaaccgtcgccgttattgataccggaatctatcagcatcccgatttagaaggcagagttatcggatttgcggactttgtcaaccaaaagacagaaccgtatgatgacaacggacacggcacccattgcgccggtgatatcgcaagcagcggcgcttcatcttccggtaaatatcaggggccggcgccggaagccgatctgatcggagtcaaggtattaaacaaatcaggatcaggaaccttggctgatatcattgaaggtgtggaatggtgcatacaatataataaagaacacacaaagaatccgatcagaatcatcagcatgtcactgggcggagatgcgctcagatatgataaagaaacggacgacccgctcgtcaaggccgttgaagaggcatggaatgaaggaatcgtcgtctgcgtcgccgcgggcaactccggtccggaagctcaaacgatttcaagccccggtgtcagcgagaaggtcatcacagtaggcgcctatgatgacaatgatacggccggcaatgaggacgatacggtcgcttctttctcaagccgcggcccgacggtgtacggaaaagagaagcctgacattcttgcgcccggggtcgatatcgtatctctccgttctccgcgttcataccttgacaaattacagaaatcaaaccgtgtaggctccttgtatttcagtctgtcgggcacgtccatggccactccgatctgtgcgggcattgccgccttaatccttcagcagaacccgcagctttcgcctgacgaagtgaaaacactgatcaaacaaagtccggataagtggacaaatgaagatccgaacatttacggagcgggcgcagtaaacgctgaaaacgccgtgccgaaagagtaacctttttatcatgagaacggggtcgtctaaacctgcagatgaccccgttttttaggtgaacagatgaaacatttataatgaaggaactcggaatgctccagaaccggctgtcagaaaaaaagatcaatgcaaggcagtgtatttctaaaaaaatagggaataagtatggtgtagataaaaggaggaatcacaatggcacttacaaacaccgaattgtctgaatggctgcaaaaacagatcggacaaacgcttgatatcaggaaaggagagctgacagacagccgaaacgagatttctgatatggatcagatcatgcttcaccttgatgatgttctcgtccgccggacaaaccatcccgatgactatgtagcggacgaagaactcgtcttaaaagggcacggcacaacctatacggaggaaggaaatgtcccgcttccccaagatgcgtatgaaatccctctgctcggcgacatcaccatccaaaaggagcaagacggattaaaggtacatacagatcgggccgtttatacaatcgggacccggaaagagcaataaaaagaaaaaacgccctgaatcagcggcgtttttttattggtttttttcttctgaatatccgtggaacatcgtgaatgcgcaaagcataatgcctaaaataatgataatcggaagccagatcacggcaaacttataatccggttcggcaaaagcgccgatgaccgctccaaagcaatacagcaccaaggcaagcgcgcgcaatacagcatctctcgtaaactgcttccgcttgtccgctttgtaaaaccttgcggtgagatcttcaaaaaaattagcgagcgttcccgttaatacggtcgtggaaatccccgctacaccaagttttctcgcggctgtcgtctgcattcccattgcgaagctgagcagcataatcagcacataaacagaaatggcatctgcaaaaaagcaggagaacaaagcaaacagcagcaaaacagctccttcaatagctaaagcggcagttaccgcagggggccagaatgatttctttttattgcccacaagcagggccgcggcaataacgccggcaataaatccgattaacgaggttaacgatttgagtacggcaaggtgccacgagttgccgatcgccaggccgaacagaacgatgttccccgtcatattggcggtaaagatatgtcccaggcttaaataaccgatcacatccacaattcccgctgttaaacaaagaagtaaaagtgcaatatttcggtatgtagtcactgtcaatgtgatccaatcctttctcatgctgattccaacatataagtttactctttgccatttcatatgtccagccggcgtgccgctttttcagagcataaaaaaactccggcgaaccggagaagctactgaacgataaataatactctcgtgccgtcggaatatccgctcatttgatttccaacccatgaaccggctccgcggttatccgacggggttacatatctgatatcagcccccgccccgccttctgtgcagactgccatgggccattcatcacggtcaaacccgggctttgtcggaattcctttcaatgattctttccttctattctccgctccgccccgatcaattgtacaaatctcagaatgacctgccgaaatggcgtcttttatatgatttcccgtctccggatattttgacagcgggaaatacagcacctgatcgtatcgggatgcggcacgagcagcactgtccgaatggatgccggcgcccgtaaggccgaactgaagagagatcaccaaaagcagacttgccgcccatttcataaacgcattcattcacatcctccttaagaagttgatatgaagcgtaaatatgtatattagccggatttaacacacatgatgaaatggcaaaaaaagtttgctgttttgttgataatcaacgaaaatggcggctttacgatttgtctattgaaccggcttctgtttccttatatattttagacatacttatgagccgttgtgatcagtgtcttcggcagataaaaggaggaatgccgtccggtcggcaggcaccggctgtttgttatgtcttttcaaaaacatgaaggcggggaaatccagatggaaaaaacaatgtttcacccacactcacccgagtttcacgaaaacccttttgcggttttaagcagattcagagagcaggaccccatacataaattcgaactgcagcgtttcggaggcacctttccggcttggctcatcacgcgttatgatgattgtatggcgtttttgaaagacggcagaattacgagagatgtaaaacgagtcatgccgaaggagctgatcgcgaagctgaatgtcagtgaagatatcgattttgtctcagagcatatgctggcaaaagaccctccggatcattcacgacttcgatctttggtgcatcaggggttcactccccggatgattgagcagcttcgcaccgggatagagcagatcacagaagagctgctggatgaaatggaaacaaaagcagaccctgatatcatgagagatttcgccgcaccgcttccgtttatcgtcatttccgaactgctcgggattccgaaagaggaccgcgccaaatttcaagtgtggacaaacgcaatggtcgacacgtcagaaagcggacaagatgcgaccaaccaggctctcaaagaatttaaacaatatatgaaaacactgatcgaagaaaaaagaaaacatccgggtgaagacctgacaagcaagcttatttacgctgaagaggacggccaaaagctgagtgaatcagagctgtattccatgctgtttttgttagtcgttgccgggcttgaaacaacggttaaccttctcggctccggcaccctggcgcttcttctgcacaaagaccagatggagaagataaagcggcagccggaaaatatccagacggcggtcgaagagcttttgcgttatacctctcccgtcatcatgatggcaaatcgatgggcgattgaagatttcacctataaagatgtttccattaaaaaaggcgatatgatatttatcggcatcggttcagccaatcgggacccggaatatttcgatgatcctgatacattaaatatagcgagaacaccgaaccgtcatatctcttttggattcggcattcatttttgtctcggggctccgctcgcccggatggaagcatccattgcctttactgcgcttttaaaacggtttccgaatatagagctgaaaggcgcgcccgaggatgtaacatggagaaaaaatgtgtttttgagagggcttgaaacatttcctgtcagattttaacatctccccccctgtttatcgggggtttttttaatgtcttataaacagaaatcaatacgacaatgaaaatttagtacatagtaaatttagttctatatggataaaaaaagcggccggattgctccggccgttctctattaccgttttaccaactcatttgtttcgtccagcttttttctgaaagatttaaggaaatttgcgcttatcgttcctttgtttgcgtacagtttttcgcagaatgctttaatggcgttttgcggctttggttccgacagcattgtgacatgattggaagagtgaacgtccaacaggtgaaactgtttcatctggcgttcccattctttccaatacgcatcatggtctaacggaatttgttcttcctctgctgtcagataacgttcaagatgtccgaggaacaaaccgcttttattacggaagtagtagcattgcagcgcttccggatgaggcagcggcttcatgtcatactcttccattccgtaagcgagctgcgtcttcatcatttgctccagctgcatccggatcgcttcttcggattttggcagaccgcgctttttggcaaggccgatcaattctttcaatacttcttcttcctcagcctggacggtaatgtcttctctgctgattaatgcctcttcaaggttttcaggcttaagatatgctgtaagcatcgtattgatcgtttgcagcatgactgacttaacagatggttttctttctttccatttttcactgtacggggtgtcgatcatgacggcgctttttaccgtatgaccttcctcctgcaagaggcgcgcggtttcatatgcaagcatgccgcccaaggaatatccgccgaggtcataagggcctttcggctgtaccgcttggatgattctcatataagaagcggccgtctcttcgattccttgcagcggctctttccctgtcaaacctcttgcctggatgccgtaaaaaggtcgctgactctttttggcgaatggctggtatgcttccacgcctcccgttccgccgtgaaaccaaaaaacaggacggcctttttctctttcattcagcttgacgagttcgggaaaattccggcccgtctcctgcggttggttcgtttttaacagcatgcagatctcctgaagagtgctgcatttctgaagagcctccagactgatgcggctgtctccgtcctcaagtttcttcaacagctgaatagaggagattgaatcgaagccgtattcagtcagcggcttattttgatcaatttccgctgccttcatccccaaaatgtctgccacaatgtcagccgcgctctcgcagcggatctgaggattctgtgaaaccggtgcaaggctgatgtcttctggctgaccgccgttccaatacttatggttttcaaaaggatatgtcggaagcggcactctttgaacagatttgccttggtggagtctgtcccacggtatatccgcacctttcacccagcaaaatgcaagtttttcgagattgttttcagccaacagcgtctccgtgacgactgtaccgagagtcccttccagtaaaacgccgatatctcctgatccagtctgctgactgcctgtaaagaagcttttcattccattgctttcttcggaaaatgctctgtactctttcagtttttccagcaattcatcttgattgcgggcaacgagtgccaggcggcagttcatcgcctcacggccggtctgaagcgtataagcaatatcccgcaatgacagagtatctccagtttgcacaaaatcagccagctgacttgcgaccgccttaagacgcccttcgctcttagcagaaagcacgataagctgcggttcatgcacagattctttgtctttatggctcgggctgtactgttccaagacgacatgcgcattcatgccgccgaagccatagctgttaattgcggcccggcgcgggatcggtctgcccgtatggtcggtgagctgtgtccattcctgattgtcttcggtgaaacggaagcggcttttctgaatggccatttgctcatttgcagctgtaaatccgggaatacccgggatggtatgatgcttcatggccatcgccacttttataagggcggccagtccggaagcgagttcgccgtgcccgatgcaaggtttcacggtgctgatataacaaggcgcgctttcctcttgatttgcagactcgccgtaacccgctttgattgcattaaactccagcgcatctgccatttcggaggcaatgccgtgcgcttcaatataagtgacagtttgcggatcaacatcggtgtcttcgtacgcttttttcatcgcggccttcattcccgccggattcggtgcgtgaagcgacatgcctttaccgccgtgagacactcctgttcctttaatgaccatgtgaatatgatcgccgtcttcaattgccgcctcaagcggtttgatgatgataacgcccgccccttcgcttctgacaaagccatcggcatctttttggaacgatttcgcccggccgtttttgcttaaatatcccattgagtcaaaaccgataaagcccttcggcgactgcagaatattggcggcgcccacgacagcctgctcacattcgttatgacggattgattgaaccgccctgtgcaatgccaccagggttgacgtgcaggcagcctcgtaatattcactcggtccttgtaaattcaaggcatatgatattctgttcggaatgatggacgggatggctgttccattgttcggatcgctgttgcccgcggcaacgaaaacgcctgtcggtctgcttgataacgccttatttgtcaggcccgcatcctccattgctttccatgtatgcatcaaaagcagaaactgctccggccccatttgtgatgcctctttaggggaaattccgaaaaagagcgggtcaaattcgccgacaccgtcaataaaaccgccccatctgagactcgtgtcattctcatcaccggcgtaacggcgccagtcccagcggtccgccggaatttcggtaatacagtgatccccgtttacgatgtgctcccaaaaagactggatatccggggattgcggaaactgagctgacataccgataatcgcgattccttgcttgacatcggcgttatcacaaggcgtatgctgtttcctcggtaaagtgcgctcttctgtttccgtggccctggcctcttctgaatgcttatgatcggcaagcaattgagaaaacttgctctcatatgctgacgcgaagtggcgggtcagctcctccgcggtcggatactcgaaaaacaatgttggattcacatcgatgtccgcctcttggccgatctcttttgtcagcccgatcaggcttgctgaatcaagtcccaattccatgatattcgcgtcagaacgaagagatggcccgggttcatccatcatcttggcgagcttgccaaggacgtagctgcggatatcatctgtcagactgccggcagaaatcggtgctcccgcattcttaacagccgttcgggccggctgattcatctgttcggttttcggacggaaccgtttcagggcatagccttcaaaacgcatcaccacttccgatcggctgctgatgacatctgcgttaatcagaatcatttcccccgtttgtttggtcagcttgatgtgcagccagcaatcgataagatcttcagggctgctgaaggtgacggaattaatgccgaacggcagatagctttccgcctccgtttgatccaataaagaaagtgaggccaagtaagcactgttggcgatgaacggatttacggcataatgatgcgcttgttgtgagtcgctattgttcaggttcactttcgctaaaacggcatcagagcctttgtacaggcgggtaatcgttttaaattcttctccccacacgacgggtcccgttccgtctccgtataactcatctatccggcccacttcccggtaagagcgctgaatggccgccagatccgcgtgctgcttttgaaacggataggggctgcactcggcatacgccgctatgctccaatcaggagacgtgcggctgcggtgcattatgctcagttcaaatccatccccgttttgtttcgattctgttttcagctcgatgcgatcgcctttttttacggtaatggggctgacgtaattcagttttttaatttgtcctccttccgcttcaggaaaaagatcacaaaaatgatcgactgccagactgttatatgtagcgccgacgagtaccggttctccgctgaattgatgccctttcacgtatggatcgtcatcactgtataccgcctgaacgccggcagcgttttctgattcactgaattgaaaagaagtcccgtggtcaaaagcgtaggccggcagatgaacggcgtgctcttgctgcaactgatcaaacgcgatattctctcctttttcccattgccgcgcacgccggccaatatcagattcagagaaattgagattccgctgatccatgcggtaagcggccagcttttccagcagttcctgaacggaagcagccgtaaatgccgcccgatactccgaatgatgcgttcttttttgcagcgcggatgcgatggcggccggatgaagagatggcgtcttttctaaaaaggccgccagtctgtcaagataggcttcaaaactccattttgttttcgctgacacagggaaaatatattcctcatcgccgtgacgggcctgatcggaattcgggctgatatattcttctacgatgagatttgcatatgccccgcctgccccgaaggaattaatcatgcttctccgcgggatgatgtcccccgtttcggcatccctcatacgctcccaatactcggttttttcctgcaggtgaaaagccgtttgttcaaggttgatattcggattttgcggttttgcgttaatcgtcgggactaatgtttcccgctccatttgcagcagcactttcgcgagctgggacatgccggaagccgcctctaaatgaccgagatttgacttgacggatccaagcgcgcaaaaacgttttttatcagtatattgcgcgaacgcatttgtcagggcaatgacctcaatcggatctcccaatacagagccgtttgccgctgattcaacataactgattgtttccggattgattccggccttgtcgatggaagccgccatgagcttcgcctgctgtttcggatccggagccgtgtacatctgccttccgccgctatggcacaacgcgctgcttttaatgaccccgtaaatatggtctttgtcggcaagcgctttggagagcggcttcaagagcaccgccccgactccttctcccggcatcaggcccgtgccggttccgaagcttttgctttcacttccctgttcaagcaaattcgcccgttcgagcgcatcatatttagacggttcaagcgtgagattgacccctccggcaatcgccatggaacagctgttaagcttcaggctttcacaggcgagatgaatggcgctcagtgagctggagcatgcggtcgtaacgcccatgctcgggcccgttaaattgaaaaagtgggaaatgcggttggcgatatgccaatcccctccgttagagctgagcgcagctttttccaatgacgggatattccagaaatattgattgtacatactgcccataaatacaccgatgccgctgtctgattcctgccattcgtttactctttctaacgagtagcctccgttttcaaatgtttcccatacggtttctaagcttagacggagctcaggcgtcatctccatcacatggtcttcccggatgtcaaacaagtgatggtcaaaagcgtcaatatgctgcagaaatccgccgtaccgtgttttgtgttcttcttttcgtgtttcttttgccatcgttttcagaagaccggacttccatctgttttccggagctttcgtaatacagctgtctccggcttttaaatgctcccacagctcatcgagggtttcagactcgggatagcggccgctgatgccaataatggcaatgtcgtcacgatcagaacgattaacggtgacggtttctgtttccggctttggcgcttttggctctttttgttcagtgataaaccgccgcgtttccgtgacaagcggcaccggttcattcattgcaggttccggatgctttgtttcaggaggcgcttgttcggctccgaatgcctgttgcagcttatccgggtaagtttccagcaaatactcggcaagttctttcgtattcgtgtgttcaaataagaccgttttcggcagctcgcccgtcaatgtttccagttcacggataaaattcacctgcaaaatggagtcgatgccgtatttttcaaagctggtttccggctgaatgcgctcgggagcaagctttatggacttggctaacgtttcttttatgaattgcacagtccggtctgtgactgagaaagacggttctgtgaaatcagcctgctctttggaagccgcagtttcttcaaccgcctgcgcgtccggctgcttttgcctgatgacgccgtcgctttctgccgccacgatctgctggccgaggtgatgtgacgattccgccataaatgtaacgtaccgatatccctcgctttccagcgcagactgccacgcttcaggatacagccccgggcatccgggaatgcgcagtttggcgtcttcatacagccaccagccttccaaaagaccgaatgtcagatgagaataaaccgaatggctgctaatctcatttaataacaaaatcccattctttttaagcaccactttggcattgcgaagtgtccgccgaatattttttgtcgcgtgaagcacatttgccgcaattaccgcgtcatatgcgcccgcctctataccctgcaaagccgggggctcttccacattaaaccgcttataagtcaaatacggattgtcgggaccgtattctttttcagcatgcatgaaaaaggcctttgacagatcggtgtagcaatattctttcacatgatgtttgtactcttttaatcttttgaaaacggccgcgctcgtcccgcccgtccccgctccgatctctaatatccggatttccgcgttcgggtcttctttcaggcgttcttcaatgaaagccgtcaatgtgtcagcgagcacctcattaaagtagtctgccgtttcattgtttttatagattccttccaccaattccattgaggaatcaggaaacagaacatcagtggcagaaactctgccggataaaatatccggcaaagctctgagagcggtctccactaaggtgatcatcgcctgtttgctgctgtccttgagtaaaggagctttcttttcatcccattcttgccacagaacgtccgcacgctctatcggacctgttaacacatacgtactgcctgactgtttcaaaaagcctttttgcaccaagatggagatgctttcttccagccacctgccgtaaaacccctgcatgacaggctgcgtttcgttttccgtgaaaaatccgacagatttcagctggcctgccaatagtttgtaaagaagatcttcagtgttttgcaaagccgtcccctccttaactcaattgttgtacatgtcttgttactttaggctgatagcttcgcagtttttgcatcgccgagccgtgatgttcagggtatacttctatcatttcttccggtttttcctccggctcttccgcctgtttcatcatgacgaactgattcaacgggccgccgagcaatcgttcaagcgccgccattgcttccggcgcttcaattgatccgactcccgcctgtttcatccgttcttgatagtcggcagatgatacgattccgacactgccccagtagctccaattcatcactgccgccgaatacggccgaacttgagccaaatgagcggcaaaggcatctttgaaactgcatccggcagcataattgctttgtccggccgctcgtgcaaatgattgaacagatgagaagaacaaagcaaagtccagcggctcattttggaacacgcgggccatattcacgctgacattgactttcgcagcgagcacgcttttcaaacggctttccggcatatttgccaggctctgatcctctaaaacaattgcggaatggataattccgttaatttgcgggtgcgtgcgtttgatcgtttcatacgcccgtgtgagctcattcggatttgccgcgtcagcttcaatataaatcggcgccgggccgaattggctgagtctgtcgattttttcctggatggcgctgttatgttttcgtctgccgatccaaacgactcgcgcctgatacgttttcacggcatattcgctccatgcctcgccgatgccccccgcaccgccgatgacgacataaacgccgcctttttggtaggcgggccggcttgacaccggctgctgtacaggaatgaggcgctgtttgtaccagtgattgttccggtacgcccatgtattgccttgctcatcaaacggcgctgagaacagctccgcctttgaaacgtcttccggacagccggcatcaatcagccttgtttgccagttcggatattcttttgcgagcgagccgaccaaaccgtgaatgcctgcatgagccggatcaataatgtccgccggctgtacggactgtgtttttattgtgactgcagtcaagctgattcgcttgcctccatattctaaagcaagcatggccttaatcactctgtacatctggatgacgcccgcatcctgagcttttaccatgtcatcagcgctgtgaaaaggagcgatccatacgatatgcccgaaagaccctgttgctttcagttcagccgcaacagcctctatttcatcctccggggtgatatgaagccgtttcgcagaaggatgatgcaattgaaaagccgcgctttcctcatcccccgcgataaagacaacctcttccgtcttatatgccgggctttgatcacggaattccgcgagatcccacaccggagccagaaggtttgctccatttaatgatgtttccggcgcggggccttccatcattctggaagaaatccctttaattctgacacagacccggcctgtctcatcgcataagtcaatgtccatacgctgtattttttcatccgttccccgggagctgacatacgcccacatgcttgtcgtgcacgggctgaaaatgtccagttcttcaagggcgaacggcagtgacagctggttatcatctgcgtgcagcttcagaccgattgtcgcttgtaaagctgaatcaagcatacacgggtgaagaacgtattgatctgccgtttcttcgaggaaggaaggcagccggagctcagccaatgcttgattgcttccgatatgaatctgctgaattccttgttgtccgggaccgtagtcaatgccgattttgctgaataagccgtaacactgttcagaagtcagtatactgaggccgcattgagctttcagtgcgcctatatcacggtgcggagcctccccggcgctgagaatgccggcagccccctgacagtgtatctgcctgccgcttgcttctgtttgtgaatccgtgtaaacgtcatacacgatttcaccgttttccctcgggttcaggctgatttgcgcttcaatcgggcggtttcccgcttcgatcggccgaacccaaacgatgtttttcaggcgggtgacagatggacgttccttttgccctttgactgcctgagcaaccgccgccctagccatttccaagtaggcaacgcccggcataaccggcttgcccttaataagatgatcggtgaaaatcgtctcttgtcccgtaaattcggatcggtaccgctgctctgttaaatctgatacattttcgtgaagcagcgggtgcagcacccgcgacgtcggcacagcttgcggtttctctgctttcggccgattgtccgtgatccagtaccgctctttcgcaaacgggtaagcaggaagactcatccgttgaggcttgatatcagaatataggccgtcccatttgatatccgcgccctgcacccataattccgcaagcttgtcattctctcggcggcttatcagctcttcgatatccgcctcgccgtttgcacctgccagaatggatttcagggaggttttacccgcttttcctttataaatgcccgctatatcataacgtcctttcgcacagctctttagcttgtcccgcagttcttcggccgaggaagcgataatggccgctctttcttccatggcatcacgcccctgctgaagcgtgtaagcaacatcggcaagatccgcatccgtaaaagaagcttgcgccagctgctgcgcctgttcctgcagacgttcttcttctttggccgacagcacaaagatttgagggtgtgtgaaaacagctgtttttctttcttccttcgggatatattcttcaatgacgacatgggcgtttacgccgccgatgccgaaagaactgattcccgcacggcgcggcagatgattgccgttttcgtctttcaatgccgtccattctcttttttcctgtacgatgtaaaacggactgtctttcagcttgatatacgggttgatgacctcgctgtggaggctttttgcaagtgttttatgcttcatctgcatcagcactttgatcacacccgcgacaccggctgccagtgacaggtggccgatattggttttggccgaacccagaccgcagtgactcgcgtaaacggcggaatcgcctgttttttcgtacagcttttgaaaggcggatttcaggccgttgatttcgaccggatcgccaagctccgttccggttccgtgcgcttctatataagtgacggttctcggatcaatgccggctttgtcataagccgttctgacgacttccgcctgggctttcgggttcggtgtcgtcaaggagttcgcgcgtccgccgtggttgaccgcgctgcctttaatgacgccgtaaatatgatcgcccgctttttccgcttctgacagctttttcaaaaacagaattccggcaccttcactgacggcaaatccgtccgccctgtcggagaatgttttacatttcccttctttgctcagcgcccccgctttgtcataagcgatgtggccttgcggagtgacgacggtattcacgccgccggcgatcgccatatcgcagttcccgttttcaatggcgcatacggcgtgatgaatcgcgaccagcgagctggaacaagccgtgtcgatcggttcactcggcccgtgcagattaagcatatagctgacgcggttcggtcccgctgacggactcatatttgcggctgacgcaccgccgatatccaggtcggaaaacagtgagccgtatccggtattccccgtgccgatatacaggcctgttttcgtgccggaaaggcttttagcggaatatcccgcatcttctatcgccttccacgcatacatcattaacaagcgctgctggggatccatctgttcggcttccagcggtgaaattccgaagaacagcggatcaaaatccgcaactccgtcaataaatccgccccactttacatttgttttattggcttcattaagcgggtcaccgtaatactcacgccagtcccagcgatccgccggcacctctgttatacagtcttttccctcttctaagttgcgccaatactcatcaatatttgcggccttcggaaacactccgctcatgccgacaatggcgatcggttccggtttatgttcagccgccgtctgaacaggctgtacggcagtttttgcaaatcgtttgttccctgccagtctgataccgccatcatcagttacgctgctttgtttttcttctttcggctgtgtgctgccggcaaattgtgtttgatagtcttctgctaaatgatgcgccaaggcttgaatcgtcgcatattcaaaaaatacggtcggtgtcagatcaagctggtaagtgtcattcagcttgttggcgaattccgtcagcgtaatggaatcaaatccgtattgattgaactccaattcgatatcgatttcttcaatgtttattttcagaagcccggaaacctcttttgccagcaattcctgaagttttgccgtcaggtctttcggcgcaggcgtttcatccgttttcttaaccggtgcaaaagcggccgcaggagtcttttgaagcagcttttcccgcattacggcgcggtttccttccatgacgagcacgcttgttttccccgtgctccatgctttgtaaagagcttctattccggtctcagtgcgcatcggcgttacgccggttcttttttcggtgagcttcgccatttcttcattgacttgcattccgccgtttttccaaagcggccaattgaccgacaatgtgtgaccgtggcggtacattgcggtaaccagcgcgttgcggtatgccgcatagctgtccataaatgcgtttgccgccgcataatccgcctgtcccgcattcccggtgacgccggaaatggatgagaaaacgatgaaaaagtccagcgctaaatgctcggttgcttcatcaaggttgacaaatccgtccgttttaggagccaatacactgtaaaactcttcggttgttttctttgcgatatactgatctttcatcacacccgcgctatgaatgatgccgtgaaggccgccatattccgtctcaattgttttgaccaggtctgccgcagtttgagcgtttgttacgtcagcctgcttgtattccgcttttgctccgagtgattcaagcgattgcagctgcatccgctgattctcgcttaatgcggaacggcctgtcaaaaccagtgtcggctctttgactttgcgggcgatttctttcgcgaaaataaagcctaagcccccggctcctccggtaatgagatatatgcctccgtcgttccacggaatgcgtattttgccgccggacacggccgtttctttgacatctgcgctgtatcggatgccgttttcatatttgatatggctgtcatcagcccgtgttttattttctctgatgatgtctgtgattctgccgttttccgccggttctatttcaatcagctgggttttcagttttttatgttccaggccggctgtttttaacaaagctgaaatgcctgagagcagctgatgcttatctgttttagagagaaccgtctggatgaggacgtctccatccgtctcttccttcagcagtttttgcagcgtctccaatatccgtcctgtataatcacggaagcgcgccgccgctttcccgtgctgggaggtcatttcaatacatgcagctcccgcggcttcaacggcttgtttcaatccggcctctgtgtcacaaagcaacacgatatgccgggcaaaaaccggttccgtttgaacggcggtttcatcacttcgggtccataccggctcaagcatgagcgtttccggagctttttcttttttctcaggttctttttcagccgttctgaatgacaaacctttcagccttacgcaaaccttgccgttttcatcacaaatatcaagatcgcgtttttcaatctggccggctttgtggtcttcagaaagtctggcgtaaacccacatctcggcagcgcatgcgctgaatacttcaagctcctgaaccgcaaacggaagcatcagtttttcatcatttgttccggttaatatgcttgatgcctgcaatgcagagtccattaagcccggatgcatgacatactcctgtaccgtgtccgcacaagccgcatcaagtgacagtctgcccaatacgaaatcatcacctgtataaatcgctttgacaccccggaaagccgggccgtaatcaaaaccgattttgcggtacatatcgtacacttcatctgcagaaaacggtgtctcggcggattgtgatctcagcttttggagatcaatgaccggagcctcggcgtcagggcggactgatactgccccttggctgtaaacggacggctgatctgtttcccggccgctgtaaatgtcgaattgaacgtcatttgccgtttcaggaatgagacggatgttgacatgaaccggctcgtcttcaatggtgatcggccgcacccaaaccgtattcttaagcttgacgcttccttgtccggccggaacttcagatgcctgttccattgctgcgcgcgccatttcaagatgtgccactcccggtaaaatcggtacgccttttacaacatggtccgcaaggtaaaattcttttcctgtatagattgaactgaaccgctgttctgcaaggtttgaagtatttctgtgcagaagcggatgaagcgcgtcttgttttccggcagatacagtgcttgttttttcgtgttttccggtgctttttgccgcccaatagcggtcttttgcaaaaggatacgatggcaggctcatgcgtttaggccgacggtctccatacagcttcgcccaatcgacgttcagccctttgacccataattcaagcagcttcgcgtatttgccgcgtgccatccatttttcaacggcttcttgaatttcttcatcttccgtcagcatttgcagcgtgcctttgtctattcttcctctgtacaagtccgcgtgcttatctccagtgataaactgtgacagtttttcctgcagttcttctgcagatccggcaataaccgccaggcgttcttccatggcgtcccttccgatttggagggtatatgccatagaaacgagggaggattgatcgtaccgtttttcagtaagcgcacgtttcagctgttttgcctgctctttcaggcgtttttcatttttggcggacagaacgaaaagacatgggtcgatatgagaatcatctgcttcctctctgtcttctggaatgtattcttcgatgacgacgtgggcatttacgcctccgatgccgaatgagctgatgcccgcgcggcgaggctgttcgtttccgcgttcgtccgtctgcgtcttccattccattgtctcccgcaccagataaaacgggctgtcttcaagctgaatgtacggatttaccgtctcacagtggagactttttactagtgtccgatgcttcatctgcagcaaaattttaataatgcccgctgctcccgcggcaagggataaatggccgatattcgttttgaccgaccctaagccgcaatagccggccgctttctcttttccgtctgcaaacgagctgaacgcttgtttcagtccgttaacttcaacgggatctcccagttctgttccggtgccgtgcgcttcgatataagagactgttttcggatcaatgcccgcttttttgtatgcggctttaatgacttccgcctgttgtttcgggttaggcgttgttaaagatgccgcgcggccgccgtgattcaccgcgcttcctttaatgacgccgtaaatatggtccccatccgcctcagcggctttcagctttttgaggaaaaagagaccggctccttcaccatgggcaaaaccgtcagcctgatcagagaacgttttgcatcttccttctttactcagcgcgcccgctttgtcaaaactgatatacacgtccggaagcacaatcgtattgattcctcccgccaaagccatctcgcacgtcccttcttcaattgaagaaacggcatggtgtatggcaacgagcgagcttgagcaggcggtatcaatcggttcgctcggcccgtgcagattgagcgtatagctgacacggttcggtccgacagacggacttgtattcgctgcggatgacccttcaatctccgcatcggcattggctaaaagagaaccgtagccggtatttccggtcccgataaacacacctgtctttgtgcctgagagactctttgacgcatatccggcatcttcgatcgctttccacgcgtacgtcagcaagagacgctgctgagggtccatttgctccgcttcccggggtgaaatcccgaaaaataatggatcaaattcagcaattccgtcaataaacccgccttggttgacgtttgttttattggcttcttttgcgggatccccgtaatagtcccgccagtcccagcggtctttcggaatctcggtcatgcagtctttgccttctttcaggttctgccagaaagcttcaatgtcttctgccatcgggaaaatcccgctgatgcctacgattgcgatcggttccggcccttggccccgctgcactgtctgcggaagtgtctcaggcagagtgcggcgtcgcttaacggcagggcgcgtgatttgagtctcttttaccggtcttgccgattgaaccgtttttgtatttaccgcaaaccgtccggcaaattcctcttcgtattcactgattaaatgaacggcaaattcatggattgtcggatgatcaaagaaaatcgtcggcgttaacgtaagccggtacgttttgtttaactggttcgtaaactcagtcatcgagatagaatccagcccgtattttgtcatttcttcatgaggatcaattttgtcaatgtttacttttaacagtgaggccgtctgctgttttaacagatgcttcactttttcaagcaggctgtcagcatcaatgtcatgacgtacgccggtctctgcttccggatgatcattctctttgcggaacagttttgctttcatgtgtttcacatctccttcaacaaccgtcatccgggctgtcccgctcatcaagccttgatataaagccttgatgccggcatctgtgccgagcggtgcgattcccgcctcctgcatcagcatatcttccgtctgctttcctgcctgcattccgccttctttccataacggccagctgacagaaagcgtctttccgtatctttgtcctgcggcttgtaaagaacggcggtactcggcatacatctccataaagacatttgcagacgcataatcagcctggccgacgcttccaagcacacctgataaggatgaaaagacaataaagacatctaatttctcatgttgtgacgcttcatcaagatacacaaggcccttcactttcggagcgagaacgtgttggtattcctctgccgtcttcttcaccatgtagttgtcttttataatgccggcactgtgaacaatcccgtccagcttgccatgccgtttgcggatattgcggatcaatcggtatacttctgcttcgtccgtgacatcggtctgctcatagaaaacagaagcgccggcagcacgtactgtttccagcatgtctttctgcttttctctgagaacggatcggccggttagtatgatgacggcgtcttttgtacggtttgcgatctcttttgcaaagatcagacctaaacctccggcacctcctgtaatgagataaacaccttcgtctttccacggaatgtccggctccgcttgagaaatatccatctctccccaatcagcggcaaagcgcttgccgttttcatatttcacatggacgctttcggcatgcatacggttttcggacactttttccgctatgccttcagcactttctttctcttcggcttcgatcatttgacagatcagcttggaatgttcaaggcatgcggtttttaagaggccggtaatgcctgagaacacctgctgtaagcctgctgaccgcgtaacagcctgaaaaagaacgctgcccttcggcttgcttttcattatggttttgatatggtcaaacagctggcccgcataagaatgataccgctctgcaatggatgcgggacgatcgtccaagataatgacgcttgcatgttcaagctttgcttcgacagcttgttttacggcttcatcgtactcacaaaggaaaataatatgctcttcatacgaagggtcgtgatcggccggttccggctgctctttccagaccggttcagcgagcaatgtgtccgtacggctgaccgaaacgccggcacccgcgttttcttccatgatccgtgttgagaaacctctcatccgcacacaaagcccgccgttattgtcatataaatcaatatcggctttttggatagaatcgccggctttattgttcgcactgaatgtgacgtgcacccacatatcatcagcgcacggattcagaacgtccagctcttctaaagcaaacggcaatgcggctttgaatggttccccgctttctgcaagcagcgctctcgtcacgttttgcaaatattcggcggcctgaagcgcaccgtccatcatactcggatgaaggatataatcagcttttgtatgagagacggattcaggaagcttcaatttagcaagcagccggtcttcgcctttgtatacaagctgcacccctttgtaacccggcccgtaatcagcaccgatcattcctttgtaaaacgcttgagattcgattgttccctgtgtgcaccggcgcttcagctgctcaatatccgccgcttcctccggttccttccggatgatttcagcgatgccctgattataaagaggagcttcttcaccgatagaatcgttatccccgtacattctgtattgaatctgtccgtcctcttcttcataaagtccgatatggacacggacagcctcctgatcggctatcaccggacggacccatacaatattctttaagcgcaggcccagagattcctctgttgccccgccgatgcttttctccgccgcggcccgtgccatctcaagggtaacggcagccggcacgatcgccattcctttaatgatatgctcagcaataaaatactcttttcccgtgaattccgaactgaaccgctgctcctgcaagacggatgtattctgatgtaccagcggatgcaaaagtttggtatccgtttgcttcaccgtttcctccggccagaagcgctcctctgcgaacgggtaggtcggcgcactgattctttgcggcgcggaatccggatacaataagccccaatcgacacgcgctccttcaacccagagcgccgcgagtgctttcagcttttcatcccgtgtctgacatgccgcaagctcttccatctcctgagctgacacttctctgcttctcactttttcgccccgtaagatgttttggtcattgccgttgatgaaatcctgcagctgacgattcaaatcgtgacgatcatgactgataaaaacggctctctcttccatcgcttcacgtccggtctgatacgtaaatgccagatcatgcaaggaaacatcgttttcggcttcatccagaaagccggataaacaagatgcataggcagtaagacgctgcttatttctcgctgacagcggaacgatataaggcggctgtccgtcatttgatccgctgatcgttttgttttcatactgttcaaaaatggcgtgtgcgtttgttcctccgagtccgaatgagcttaacgctgcgcggtgcggcgtctctctctccggcagcggttttctcttatccgccacataaaacggcgaaccgctgaatttgatattcggattcggtgacgtgtaattaatggtaggcgccagctcccgatgatataaactcatggcgactttgacgcacccggccagacctgctgctgtatccaaatgtccgatattcgtttttacggagccgatcccgcaatactgctcccggtccgtgtaacgtttatacacttgctgcagcgcggacatttcaatcggatcacccaatgtcgttcctgtgccgtgcgcttcgatataggaaatcgtctccgggtgaatattcgtgctgtctaaaacatgctggatgacgtcagtctgaccttttacactcggtgcgtaaaaaccgactttatccgctccgtcattgttcagaccgatgcctctgagcatggcgtatatgtgatctccgtcctgaacggcttgtgacgcctttttcagcagaatgacggccgctccttctccgcccgccataccgtcggctgaagcgtcaaatgctttgacatgcccgtcgcttgaaaaattcaatccgttttggtgcacatagccgatgctggtcgctgcatgcagagttgctccgccgacgagcgcgtattccgattctccgctcgttatgcttttgtaggctgaataaagaccgactaatgatgatgagcaattggaatgaacgaaatagcttggcccttttaatccgagcttatgggaaaccatcgtcggaattgtaccgctctgcgctaacacccatgacacatagccgtcgggagattcatggccttctgtcgttttttccggcaaaagcgaccgatacgaattattgcttgccgacatatatacgcttgtcttcggaatctctttcgatacatatcccgcgtcctcgacggctttccaagaatgaagcagcagaagccgaagctgaggatccataaattctgcgtctttcggagaaatgtgaaagaactcagggtcaaagagatcttttccttctatcgtcgataatgccggcacatagtcgggattttcgatcaaatcttcaggcacgccggcttcccgaagttcttcttccgagtagaaccggacgctttcctttccttctcttaactgcttccaaaactcatgatgatttttcgcgccggggaactggcaggagatccccactatcgccacactgtcatcaaagtaagacggcaccccgttttgcggtgtttgttctctttctctctcatcttggcaggacgcctctgattcagccgcctgttttgtttcaacaataaatcggctgatcgcctgaatggtagagtgttcgaataaatccgtgacggtaaaatcgcattcaagctcctgtttaatgcgttctgccgccgcaacagccagaagcgagtcgcctcccacatcgaaaaagccgtcttcgattttgatgcccgccgtattcagcaggtcttcccatattgcggtcactttcgcttccgcttctgataacggcagtctgcccgtcttttcagaccggtgaacgattaccttgcgctgttttaggtctttgcggttcacttttccgctcggtgttaacggcagcgcatccagacggataaaatgggcaggcgccatataatccggcagactcgataaaagatggttgcggagcgctttttcgtctgccgtatgaccggagcgggccgtataataagcaatcagctttttatgtccgttcttttcctgaaccacaaccgcctgatcaagaatgtccggatgttcgctcaatttcgtttcaatcgctcccaattcgatgcggaagccgcgaattttcacctgactgtcaatccggccggcatattctatatttccgtcaggcagccatctggccaaatcacctgtcttgtaaagtttttctccttcactaaacggattatcaataaatgatgccgccgtcagctcaggctgattgtaatagcctctggccagaccggcgccggccacgcaaagctccccggccacaccgtcagggacggggctgagcttttcatcgacgatataaagccgcgtattgtgaatcggtttcccgatcggcgtattcctgcttgtgatttccttttggccgcagctgtagtaagcggcataaatggatgtttccgtcgggccgtatatattttcaattctggcatgtttgaagatggaaactgactttttaactaaatctttcggaaacgcctcaccggccaccatcacatatttcacagggccgtcttctgtaaatgccgtatgccgctttaccgtttccagaaatacattaaacacggcgggcgcaaaattcagatgcgtgacctggtgggtttggatatattccatgcaaagctgcggatttttttctgcaccaggcggcaaaatgacaagccgtccgtttccgataaaccagccgaataattcagaaatcgaaacgtcaaatacgtaattcgtttttaacaaataggcatcctcttgtgcgaccggatactcagcttccaaaaactgcagcgtattcataatggctctgtgctcaaccatgacgcctttcggttttcccgtgcttccggacgtatatagaatataagcgagatgatgcggttttgaacgcggcgtcagttttgccccgctgacagaacgtccgctgttttcaatttccaccgtgctcacaccgccgatggccaactgttcaatcatgccgcgcgtcttttcctgtgttaatacgattgacacgccgctgtcagtcaacacgtgggccatccgttcgtttggaaaagccgggtccagcggtacatacgcgcctcccgcttttaaaatggcgaggatgccgatgaccatctcaaaagaacgcttcgtacaaatgccgaccgggcattccggtgtgacgcccttttcttgcaggtacacagcgagcgccgtgcttcgttcatctaattcgcgatatgtaagactgttttcaccgaatgtgacggcttctctgtcagggtggcgtccggctttttccgcaaacacttcatgaatgcagcgctcattcggctgatgggatgaacggctttcatcccgtttttgattgagcaggccggaacaggcttcaaaagcgatctccggatcagaaagcaccttttctgccagtttcatataatgctccgccattcgttcgatgaaagaagggctgtagacatccgggttgtacagaaattgcaggacggttcccgtttcttttttatagacttcaagcgcaagctcaaattcgccttcctgatgaatgtcttctatcatttcaatgccgagtgattgatatagttccgccagcttttccgctccttctgtccggaagaagttttgatagaaaaacgcggtttgaaaaacaggcgaaaccgcaggcgagcgttccgtcttcaattctttgacaagtgcgggaaacggatacgcggcatggtccagcccttctgccagtgtcagctgcagctccttcaaaaacgccgtaaaagatttggcgcccgtctccctgctcctgaccgcgatcatattaataaagtatccgatgacagactcaaattgagcctcagaacgccccatcgtcggcatgccgacgatgacatcttcctgattcgtatattgataaagcagtcctttgaaaatagcgagatacacaacggattcattgacattatgtttttgggcgcaaactttaatctgccggttcagttcatcaggaagcaagcgctgatacgcctgccctttgcacgtttgaaccgatgatctcggataatccgacggaagctcaagcaccggcagcggtccttccagctgctttttccaataagagagatgcgcttttcccgcttcgctttccagcagctctttttcccatttcacaaagtcatgataatctgcggcctgctgaagcatgacaggttctttgccttcgcttgcttttacataagcgtccagcagcgccgacataaacgtcataagagagacgccgtcaaaaatgatatggtgaatggtgattaacacaatcggctcccgcttcgcccgccggaatacttgaacacgcaggagcggcccggtttcaagcgagaacggttcttttgctttttctttaataaacgtaagcgcatcacgcccgcttaattcagaaagatccatttcttcaatcggaaaatgccgatccgtatcttctatctgatacggaaggccgttttcctcttttatcacactggtcaaaatagggtgctggcgctgcacggacaaaagggcgtttttgaatgtctcgatatccagcttttgaaaacgaaagcataacggaatgttatatgcgctcatctccggaaacattttctgaagcatccacaaacctttctggccttcagaaagcggacgttttgcagttgtccgcttgaaagcctgaagcttttgttctacttcagcgatggtgagcgttcctgatctgtaggcatcgagaagttctttatgattcataggtcttactcccttctatgatgtcttgcactcttttaaaatctaatgtcccctcagagacctgtttcatcatggcgatgatctcctgatccgtatactccttgttatccggagcggcggcttctgtttcggtttcttccgttctgtaaaacgtttcgatcgtttctttgtgttctgtcaagtaatagctgatgacgtctccgagcgtggcatagctgtaaaataacgccggagtgacttcaatgccgtaatgactcgtcaaaagagcggcaaatttggctaaatagatggaatcaaatccgaattccgcccagtttttatgcaggacgagtttatctttcgatattttcagcagactgtgtatcagctctttcaaatccgcttcgagccgtttttctgcgctttcttccgggatgcggcggctcacggtttccaaaagcgcatccggttttgatgaatcgtcccgccgtatgcctaaaaatcgttcggcacggcttctttcgccggcaatgacaaggcactgggtgttgtcttgagaaatgacgcgctcaaatagctcaatgccttcatctgtttctaacaggcgctggccgcttgatttcaggtacatgcccgtcgtctcttcaccgccgacggccattccgccgtttttccagaccggccagttgatgacaaaagcgtttccgctttctgattgttcgtttttatagttggcatacgccatttggaacctgttcgcgaccgcataatcacagcagccgaaatctcctaaaacagccgatgtggatgaaaagtagcagatgaaatcaggcgtttcgtttttcagccactcgtcaagaagcaggcttccgtttattttcggttcaagcgtactgcggaaattcccgatttcattttcaaagacggatgttctgctttcgatgccggccgcatgaatgacgccgtgaatggctccgaatcgttctttcgcgcgcttgatgcagtcgcccattccgatcggatcacaaacatcggcttcggcgtaaagaacacctgcgccgagattttccaggtctttcattttttctttcttttcttcattgatcggcgaccgccccgtgagaatgacatttgcctggtagttccgggcgagatggcgggcaaataagtagccgagccctcctaatccgcctgtaatgagatatgttccgccggttctgatcctgccgttttctttcgttagtccggttggttcggtgtgatagacatatcgttttccctcttccaagaaaacggtatggtctgtttcagctttcagctcgtcccaaatggttctcatccagtccgttatggccgctccggcttttctgaagtggccggtaacacttgttttcgggagaacaatgccgagcgaacgctcaaagccgatccatgattccaagtagcacctttccagaccggatgcatattcccccgccaataacagcctttccggctgcagaccggtctcagccattgctttgagaatatggacgatacatgaataatcttcgatgcagcttttatcttcaagcgcccataaatacaaaatggcagaagcttcaccgtactctttttgaatatccgcaaaagcgttcacatatgattgcggatcttcccgcaccacttggcagcggccggcggacagagcctcataccggtctccctgagcgataaaaataacgtcaatgccactgtcatacgatttgatcacagagacggcttcctgctgcttcttctgatcagataagaaagaaatcaccgttttgacttgcttttctccggcagccggcagagcctgttctttaagaacttctctaaaagccatcacttcaaactgttccgccggatcactttcatcagccggcgccttaacgggcgcagccttgctttgtacaggctgctgatgccagaagcgttctttcgcaaacggataagcaggcaggctgatgcgggccggaggacggtctccgtataatttcgcccaatcgatgtccaatccttttacccaaagctcaagcagcttagaatatttccgtttgctgatccaagcgtctatgattgtttccagatcatcatccgccgaaaatacggcaagcatccgtttgttttcttccgtgccgtcacggtgcagtccggcgctgttttgtccggcgataaatccattcagtttttcctcaagttcatgaagtgaatggacgataaaaccgagacgctcttccatcggcacccggcccgtctgaagagtaaaggctatgctcataaggtcgctgccgctgtatcttttttcacggatggcgtctctgagctgttttgctttttcagtgagccgttcgctgtttttcgcggacaggacgatgatggcgggctgatctgccggcgtctcatcaggttctttgtctgccgtatattcttctatgacgaggtgggcgtttgctcctcccgcgccgaagctgcttaaccccgcccttctcggaagctctttgccgccgatgacgggacgtttccactcaccgagctcctgctgaacggcaaacggcgtatacgcgaaatcaatattcggattcagctgttccgcgtgcagggacggcgcaatttggcggtctttgagctggaatagtatttttgtcagacccgcaatgcccgcggcgctttcacaatgaccgatatttgattttgcggagccgatggcgcaaaactgtttatctgttgtatcctcttcaaatgctttcgttaatccggcgatttcaatcggatctcctaatgcggtccccgtaccgtgggcttcaatataactgacggtgcgcgccgggacgtttgccctttcgaaagcttcttttattaaggcggcctgcgcattcggattcggaacggtgtatccgttcgttttgcctccgctgttaatggtgcttcctttaatcacaccgtaaatgtgatcgttatcggcaatcgcccggtccaacggctttaatacgaccgctcctaccccttctccgtcgacaaaaccatccgcgcggtctccgaacgatttgcacgtgtcgcctgcggaaagcatgttcatgactgacagattcatataatggatcgggtcggtcactatgtttacgcccccggcaatcgcacattcgcttgaaccgctgtatatgctctcaagcgccagatgaatggccgtcaaagaagaggagcaggctgtatcaacggcaatgctcggcccttggaaatcaaaaaggtaagataccctgttggcaatggaccaatagccgtagcctgtcgggtagtttttgttcatcgcgccggcaaaaacaccgatttttctgctttggcacaggttgtcaggcgtatagccggcatcctcgatactcgcatacgccgtttctaaaaataatcgctcctgcgggtccattcgctccgcttccaaaggagaaatctgaaagaacagcggatcaaacttgtccatatcctcaatgaagccgccccatttcgtataaatagagccttctttacctttctcttcatcgtagtaatcctgccagttccagcgttcccgcgggatttcttctatgcagttttttccttttttaatattagcccaaagctcagccgctgtttttgcctgcgggtagcgtcctgaaacaccgatgatggccacgtcgcgaaccgaactttgccggacggtctctttggctgcccgtttttccctccgccgccagtcagtgcgaagcggcttagcaggctgtacagcctgcggttctggtgatgccttccgttcttcctgaacaggcgtttgtcccgtcagtttgatcatcgcgtcttttttcgttttgattaagtgagcgacgagcgcctcaatcgtctgatattcaaaaaataaagtgctgctgacttggtccaatacatttcgtaacgcgtttgtcagctgtacgacgacgatagaatcaattccgtatttttcaagcggcgctttcggatcaatttgagccggcggaatttttaatgtttctccgattaacgttttcaagtactcggtgcttttttctgttaaagacgtgtcgcctttttgcaccgttgtttgcgcctgaagttccggcgcatgtactgcttttggcggagaggtccgttttccggcccctgatttaagcgttttttggcgaacaatgccgttgctttttgccgctataatctgatggcttaattcatgtgccgcttctgccgggaagaagacagaatgccagccttcactttctaacacgcgcttccagctttccggatacaagcccgggcaccccggaatacgaagggcagaatcttcatgcagccaccagccttcaagtagtccgaaagtaatatgcgggaacaggctgtttcccgccatttcatttaagagcagcaaaccgttgtcttttaaaacggctttggcgtttctcagcgtctggcggatgtctttcgtcgcgtggagcacattggccgcaacgacgatgtcgtatgcgcccggctctatgtcctggccggcaagcggcgcttctgcgttaaaaagcttatacgtcagataaggattccgtttgccgtattccgtctccgcatgcacgagaaaagctttcgatacatcggtgtaacagtattcttttatatggttttgatacggcctaagcttttcaaatatgcctgcgcttgtgccgcctgtgcccgctccgatttccagtatgcggatctcggcttttgaatgtttgctgatgttttctttcacataagccgttaatgtatctgacagggcgctgttaaagtaatccgcgacttgattgtgcttataaattccttcaacaagttccattgaagagtgcgggaacatgatatctgtcgccggcacgtcttcgcgcagaatgtccggcagtgctttaagcatcgtctcggctaaaacagtcatcgcttttgtatcggcgttattgagccattcctctttttcccgctcccatttttgccatagcgcggcggttgtgttttcggctcgcgccgacagtttatatgaatccgcattcccttccagatagccatgttccagaaggaaagcgatcgtttgattgagccattttttaaagtattcatgttcgggctcatacgctttaaggctttgcggcgtcagcaagtctgcttctttaagctgggcgatcaacagctgatacagaaaatcatcaagctcctgatgttcagcctctctaacaagacgtgcgccgggcggagcgaccttcggctgttgtgaaaagacaagcggctgaggcggataaacggaaatcttttctctttcattcatcccttcgactgcgaccggttttgtcgtatgaatgaaagccgcctgatcaaccggcagcgtcataagggtttcaagcgcctccattgcagcgtccggttcgattaatcccaatccgatctgatccatcagctgaataaaatccccgtcttcagccgcttcgctattgccccaatagccccaattcatcactttgaccggacaattccatgtctgatcaagttctttcgcaaatgcgtcactgaaagcgcatcccgcggcataatggctttgtttcacgttatgaataaatgccacaagcgaggagaagaagagcgcaaagtcaagcggctcccgtccaaatacctccgccatggacacacttacatcggcttttgcccgcagcaccgatttgaactcttctgtcttcatattatttaagctttgctcagacagatccattgccgagtggatgattccgtttatttttgtgtggtgctcttttatgaactgataagccctctctaaggaagcactgtcggcggcatcggcggaaacatattcaggcgccgggccgaatgcgctgagccggtcgagtttcgcctgtatggaatcattcagtgtgcttcttccgatccaaatgatgcgtgctttgtagcggcggatcatgtattcactccatgcctcgccaagataccccgcgcctccgatcacggcataaaccccgcctgtttggtacagcgtgccgtttttcggcatattgtcaagcggtatcagttgccgctcaaacagttgctgattgcggtacgcccaaatttgaccgtttttcccggcagaaagactgagcgcctcttcgatcggccagctgccgtccgtttctgtgtcaatcatgcggatatgccagtgcggatattctttcgccattgttccggcaagtccgctgactgcggcttgtgacgggtcggcgctgtcttgatccgaaaacggctgggcatttgctgtgacgatgcaccagtccaaacgtttttctccgtaccctaaggcaagtaatgctttcatcagcttgaacacatgaagaacgtttctttcctgttctttgaggctgtccgcactctcagcctgcggagcaagccaaatgatttgctccagttctttttgtccttcaagcatgtgcgtaagagatgtgatatcatccgtacctctgatcggataataggaagcgttcggcaggtgttcttttatgcgcgtatgtctcgaatccgttccgccgaatactgccgtctgcttatccaccgctgcttccccggctttttcaagcgcaacaggctcccaagccggaatcagcattgtatggccgacaggcgcctccgaggtttctccgcccgctgtttggcctgtgtcaagcgcccggacggacgcgcctttcatccggacataaactgtaccggcatcatcgcacatatcaatgtcaaattttcttacgttgtcatctgctttgctgccttctgtgtaccggatatatgaccagatatgttcaggacacggcccgaacacttccacttcctgcatcgcaaacggcaaagaaagctcgtggctgtctgcatcgtcatgtatcgatcggacaagcagaccgacggatgcgtgaaaagcggcgtccatcatactcgggtgaagcgtatactgttcttttttgtcatgtacagctgctgggagtgaaatacgggccaataatcggtcttctccgatcagcaattgctgtacgcccctgtatgcctctccgtaatccagaccgatcttctcaaaagcaccgtaacattcttccgcagtcacaattcctaaattgcaggaagttttgacagactcgatatcaatctgggcgcttcccggttcggtaatgaccgcttcaccctggctgtgaataaccggatcttcgccgttttctgcctcactgtatatttcataggtaatctcaccattatcttctgggtaaagggcaatatgtatttccttcggtttgtcttcaatcatgaccggccggacccaaacaacctgcctgagtgtgacgctatggtctttttccgtcacggcagcagcctttttgaccgcctctgcggccatttccaaataggcgacgcccggcagtattttttgtccgttgacgacatggtcagataggaaaaattcatctcccgtaaaaagagacgtgaagcgctgctgcgaaaaatctgacgtattttcttgtaaaagcggatgcagcactgtgcctgacgggcttttctcctgttttttctgcttcggaatccaatagcgttcttttgcaaacggataagtcggaacgcttgttttacgcggtttatccgaaccgtacagcttattccaatctactgttttcccttctgcccatacctcggcaagccgtatcggatcatccgtctcaggagcggcttcgctcatctccggcagctcagcttgtccgcgccataaaccggggatgttttcgtttccttttacgaaatcattcagcttttgcttcaagtcgcggatgtcatttacaaggaagacagctctctcctccattgcttgacgtcctgtctgaattgtataagccagttcagacagcaccgtcttttctgaaagcgatcgggctagtttttccgcataggccagaagcctgtctttatttcttgctgacagcgggatgagttttgctgcatcgttctcaggtgcaggcgctttttgttcaggctgaatgtattcttctaaaatgatatgggcattcgaacctgatgcaccgaaggaactgagcccggccctgcgcggataatgtgtgactttaccgttttcttcagctgacggttgcttccacggagcagtctgctgctgtacgtaaaaaggagattcctcaaatttcaggtaaggatttaattccgcagaatgcagtgatttgacaagcgttttgtgatgaagctgcaacgccgcttttgttaacccgctgatccccgccgctgattctgcgtgaccgatatttgatttgaccgaaccgatggaacaaaattgctgatcctgcgtcccttggctgaacgcttttgacagaccttcaatttcaatcgggtctcctaacgaagtacctgtgccatgggcttccacataactgacggtccgcgggctgatacctgcttttttcagacaggccttaatgacttctgcctgtgcagcaggattcgggacggtaattccgcttactttcccgacgtggttaacggcgcttcctttaatgaccgcgtaaatgcggtcgccgtcttgttcggctttttccagcggcttcagcaataccgcaccgactccttctccggaaacgtagccgtccccgccctcgccgaatgtacggcagcggccgtcacttgagtgcatgcccacgcttccgtagctgagatatttcgccgggtgcagtgacaagttcacccctcccgcaagcgcggcctcacattcgccgcggcggatgctctcaatggccagatggacggcggtcaatgatgaggaacaaacggtatccaccgcgatgctcggcccgtggaagtcacaataataggacactctgttggcgatctgcgcataattcagtgaaaccggaaacggatcagtctcagataattgttctgcgccgattaaggaataatctttatgcatcacccctgcaaatacgccgatcggatgctgtttctcccctttatttcccagcgtttcaggcgtataccccgcatcttcaatcgtttcccagcatgtttctaaaaacaggcgctcctgcgggtccatcgtttccgcctcacgcggtgagattctgaaaaactgcggatcgaagcagtcggcatcttcaatgaaaccgccccattttgatactgtttttcctgacggggacgttacgtttttatatgttttccaatcccatcgggacttcggaacttcagtgatgcaatccgtgcctgccttcaggttttcccaaaactccgccacacttttcgctttcggatagcggccggccattccgataatcgcgatgtctccggtgtttttatgatgttctggcgcgtccggcgcttcagcttcagaccgtgatggttcggctgcacgttccgcacattcaaatgaaacggtctttttcagataggctgcgagttcttttatatttgtatattcaaagagaagagtgggcgcgaggtccgcacccgtctttttattgatatcctgtacaatctcaagcaaagaagatgaatccagcccaagctcatagtagcctgcaagaacgtccagcgtctcccaaggctgcccaagcttatcagccaaaagcttctttaaaaacagaatgatgtctttttcatctgcgctttccggctcagttgcagcctgttgattctgttcggctgtattctcgtcttcttcgaaccgaaccgcttttcccgtaatgtttttaagctccgccaccttttgtccggatcggctgaagtactcgatcgtcatcgttgtgagttctttttcctgacggacgccggaagcggcgatacgcgccgtgcactcagattgcagcctgtcggcggccgtgaacgattcataatataaaggcagatgaagccggtttgtttcagaaagcaaaccgctcgccccgattccgctcgcatccaaaagtgccggatggaataaaaagaaatcttttccttcttcgcaagaaagctcagccagcattccgccttctgtttcgtacaatcgtccgttcgatttcatcatgccggaatgaaccaagtcatgatccaggcatcggttatacatgtcatcaagattcagagatctgcctgactgcttcacatcgccgaaatcaatggtttcgtcaaatgtcacagcgtctcttttcaccatttcagctgtcgcatattgtatattgtctgacagctcgtcaccttgctgtttctgccctgaaagggagatgagccactttccatctccgctatcagaacattgaatggtcagaatgattgcagccgtttcactgacggttaaaggctgataaatcgtaacgtgcttcaattcgagctcattgtatacataaccgtgttcctgaaaaacctgataaatcaaatcgatataagcaagaccgggcaataccgcttcaccaaagaccttatggcccttcatgatgggatgatccagtgagatattgattttttccgatatcattccttcccactcctctctcatttaaatgctttccaaaacatttttttcgcaggaagctcttgtttctccgccggtgcgtcaggctcttttaccagagccttacgtcttaatgacggtaccggcagcggctttcttttcattcgggtgtctttttcttcccaagcttccagaatgacgtgggcgttcgttccgccgtcggcaaagcagttgatggctgctgacggtctggctgcatcccattcgccggctgttttatgaaaatgaaaatctgtctttgttatatcaaaatgcggcatcggttcatctcctgagagaaacggaaccgtttgtttatgcttcagcattaatacgactttaatgaagcttgcgatgccttctgcgcaaagcggatgcccgatgttcggcttaattgacccgatgccgagcggaacatgctggccagagcggtatacggattgaatcgccttcagctcaagcaaatcagttacagcggaacccgatccgtttgcttcgatataactgatgtcttccggctttttgccgcttttgaaaagcgcgctttgcatgacatctttttgcgcctgcatattaggagctgacgggcctgccgttctgccgtcattgttcatggcggcggccttaatgaccgcgtgtatcgtgtcgccgtctttttgcgcctggcttactgtttttaacagcaccatgccgacgccttcaccgaggacaactccgcctgaacgcttgtcaaatacgtgaaatgccggcttttcgtttaacagcccgcgctcttggaacatccggtgcgccgcatccgtgttcagcaggctgacaccgccaactaccgccgctttgatatcgccgcttctcagtgcctgaacggccatgttcattcctgtcaaagccgatgaacaagccgtatcaagcacgatgctcggcccgcgcagatcaaaaaattgcgaaacgtttgccgctaaataattctgcccgcccgcaacgatcgggttgcgggtattcgcaagaatttcaggatcaggctgatgctggcttcggcctccgatatacacaccggcctctatacccttgatttcttcacgggaatagccggcatggcaccaaagtttcaagctctcttccaacaccgccaatgcctgagggtccatcgctttcgcgtcgttttccggaatgaaaaagaattcggaatcaaagtgatccatattgtcaatcaatcccgcaacgtattgatttgcatatccgaaacgttccgccgggacggagccgattgcggacctgccgcttctcagcaagtcccaatattgttctaacgattccgctcccggaaaacggcagctcattccgacgacagcaatgtcttcagttacggcatcacgcttttggtcagtgtgaaccgtttgtacggcagccggaaccaacaatgctgtatcaggttcctccctttctgcaagcagcggctgcccattggatacaagccattcggaaaacgcgtcaatcgtcggatgttcatataaaacagacggatctaagtcctctttgagcgcttgattcatttgctgtaaaagctgcgctaaaatgatcgaatcaaccccgtaatcctgaaacggttcgtctgtttccagttcttccggagcgattttcagctcatcggaaaacagtttcacaagccacgccttcgtatcaataagcagttctctgtctgaatgtttttcagcggctttgccgtttattacggcttcagtctctttttgttttttctcttgacagagcagcctgtcaggatgccattcgctccgatcaatgatagccggcagaacggacgggcggatgttttcagataaaatgcggtccagcaagtcaagtccttccgcgttggacagtcccagcagcccggtctgcttcaggctttctgtgcggacttcacccaatccggtttccttccagttcggccattgaatgctgactaacggatattgatgctgatgagccgccgcgaaataatccatgtacgcatttgccatcgcataatccgactgtcccgccgcgagcgccggaacgactgcagatactgaagaaaataagacaaaaaatttcaaaggatcatttgtgaaaaggctgcttaatgtttgaagcccggcgactttcggttccagcacttcttgtatatcgtcagcagtctttctgataaacgccggatttactgaattaaccgatcccgcacagtgaatgacgccgcctatcggtcccatcgtgcgccggatcgtttcaatttccgctgccgccgcatcatgatcagacaatttcagactgatcaccgccacctgcactccttttgcttcaagctcttcaatcgcccgtatcttctctttcagtctcgtattaacggctgaccgttcatcgcggggaggaatcggctccctgcctgtcagcactacttttttcacgccgtgtttttctgtgaaatggcgggcgcataagagacccagtcccctcgtgcctccggtaatgaaaagcacatggtcttcaggaaacggtgcgggcttatgttctgctcgcttcccgcttggtatctccctgaataaagcacggtatctctgtccgtttcggcggcagatttccggttctgtgcagtccgccgaaaattcatctgcaatctgtttggcaagcgtctgctgatccgtatctgtatcggcatccatgtgtctggacgtcacgttttgatactcattttgaagcattctgtacaggccgctttttgccgctcctgcaagatgaatcgttttctgctgaaatggctccaagccttttgttacatatagcagcgtcagcggccgcgcttgccggcggcttgtatcaatcagagtctggagccggctgatcccttccagtgaagggtcttcgtctccgcatcccgtcagatcgattgcgccatctatgtgattccaatcgctagctgcagtgtcagccgaatcgaccgggagaatgaatgagtcagcgaaatgctttgcagtctcttcggctagctccgctgttcttccatcagccagaatcatgaccgtcttgccgcttttctcaccggccgaatcgatctcacacggaacccattgcttttctaaaagcacagcctcgcgccggtcttctgtttcctgcggtacggctttcggctcaggcagccagtacggctccttcgcaaatgggtaagccggcagactgattctgcggggttttttgccttgatagagtctgtcccagtccatctgaagccctttggcccataattccgctattttggcgtattttttcttatcgaaccatgacctcacaagctgcttcaggtcatcgtccgtttcaaatgctttgatttcttttttagccgttttgatatgggcttcatatatcccttcacccgtatttccgtttacaaaatcggttaaacggctgatcagttcttctctcgaaccggctgtaaccgcaagacggtaatccatcgcatcacgcccggtttgaagcgtgtacgccatatctgaaagattgatattctgattggcttttgcaaattcgatcacagactcggcataggtttttacctgaggcgcttttttcgccgacagcacaaaaatgtttgtctcatcaggctttcggcttccccggtctttcggctgatactcttcgataacgagatgagcgtttgtgccgctgtagccgaacgagctgacacaggcccgccgcggtgctccgcctgtttcccaaggtttgagttcggtattgacaaataaaggcgagtcatcgaaatcaaaatgttcattcggcgtgctgaaatgaagggtcggcacaagctgctgatgcttcatcgacagcagaaccttctggacgcttgctacacctgccgccgccgacgtgtgcccaatattcgatttaaccgaaccgatggcgcaaaattgtttgcggtccgttttttccttaaatacagaagacagggcttctaattcaatcggatccccctgctttgtgccggtgccgtgcatttccgcataggtgatgctctcagggtggatgttgtgcgcttcatacacttggcgctctaaatccatttggcttttcgcgcttggtgcggtaatgccgttggtttttccgtcctggttaattccagatccgataatgactccgtaaatatggtcttgatcggcttccgcatctttcagcctcttcaaaacgagcgcccccgcgccttcgccaggcacaaatccgttcgcactgttatcaaatgctttacattggccgtcaggagacagcattccggcttcacacatgctgatgtatgattcaggcgttaaatacaaggtcacaccgccgacaagcgccatgtcaatttcatgattcaacagcgcctgacgcgccaaatgagccccgacgagagatgaagagcatgccgtatcgatcggaatggccggtcctttcaaattgagataataaggcaggcgggccgccgcgatgctgaaactgttgcccgtcgcgcttcctcctgtctgatgtttgtttaacatcatgccgtattcattgttcataatccccaaataaacgccgcaatttttcccgtttaattcttttgagctgtaacccgcatcttcaaaggctttaaaaccttcctgtaaaaatatccggtgctgcgggtccataagttccgcttcagacggagatatattaaagaacagcggatcaaactcttcaatgccgtcaagcataccgattgatctgcagtatactttgcccttcttgtttaaggccggatcatagtatttgtttacatcccagcgggaaagcgggatgtcgcgaatggcgtttttcgcacgggctaagttgtcccaatatgtctttaggtccggcgcatccgggtacttgcccgacatgccgacgatggctatcgcgtccgctatctcgtctttaggctcccgtttggcctgcaccggttcaggttccttttgaaccgttaatctctccggctcggcaggtgttttctcctgcggggcatgttgctgcgtaagcggctttggacgtacgggaaccgcctgtttttttcttccgcggacagacggctgcgtacgcagaaaatcggcaaattgacggattgtcggataatcatacactttcgttacgttacagtccgtgccgtaccgtttattgacggcctttatccattcaagaccggtaatcgaatccatacccaagtcaataaaggcctcatcaatatctacttcatgccgctccatgtacaatacatcagccagtgcttttgataactcatcatgcaccgcttcaatcggttgttccggttcggcggaagctgccgtttctgacatcgcctccagaatatccgcttctgcttggatcacatgctgcttatgagcgtttaaaggctgcagcatgatgtttgacggttttttcacggcttctgttttctgcggttcggttgctttctcaaggatcggttctgtcccgagctctttttgcaagaaggccgcaaactggcggattgtcggataatcatatactttcgtcaccgtaagggacgtgccgtatgctttattaacagactttatccattcaagacctgtaattgaatccatgccgatatcaataaatgtgtcgtctgcgtcgatatcgtcggcatccatatataaaacgtctgccaaactttcggtcaatacggcacttactttttcagcggaaaccgccggacgggaagcgggctgtacggttcttttcggtttcgcgccgctcaaagactgcagtgtaatgtttgacggtttttctttgacagtctcctcgtgaagagttgttacttcaatgaccggttccggggcggccgccggtgcgatcggcgcagactgtgtttcggccggtcttttgacagctgcatctgctgatatgtcgatccaataactgtcttttgcaaacgggtaggccggaagactgattttttgcggtctgcccatttgatacagcttatcccaattcagcggaaggcccttcacccaaagctctaatacctttgcggctttgcctttttcaagccacgcctcaatggttttttccatgtcctcatcagccgcaaacagcgccatcgtgtctttattctgtttgacttgtccgcggtagagctggtcaattgacttcttgccgcccgtaaattcgtcaagcttctcttcaagctcgcgtaaattgctgacgatcattccgagacgctcttccatcggttcacggccgatttgaagcgtatatgcgatccggctcagatctgcttcccggtaacgcccgctccgcagtgcatcaagaagacgtttcgcctgtttttgaagccgttgctcatttttcgcagaaaggacgatcatcgacggatgaggcgcagcataagccgtctccttatcctcatcagcggaatattcttcgatgacaatatgagcgttgacgccgccggctccgaatgaggaaagccccgcggttctcggcaattctttatttactccgttttcatttatgaccggtcttttccactcttcaagcgtctgctgcactttgaacggcgtactcggaaaatcaatattcgggttaagcgtccgggaatgcaatgacggtgcgagctgcttatgcttcatttgcaggagcaccttcgtcagcccggcgatgcccgccgcgctttcacagtggccgatattggatttcgctgagccgatggcacaaaactgtttatcttgtgtttgttctgaaaaggcttttgtcagacccgtgatttcaatcggatcgccgagtgaagtcccggtgccgtgggcttcgatgtagctgaccgccctcggatcggttcccgcgtcttttaacgcctgtttgatcaccgcggcttgggcgttcggattcggtacggaatacccgtttgtttttccatcatggttcacggccgttcctttgatcaggccgtaaatatgatcaccgtccgctttcgctttagaaagcggcttaaggagtacggcgcccactccttcaccgggcacataaccgtctccgccttctccgaaactttcacatctgcctttgcttgataaaaatctgttctggccgagcatcaaatatttattcggatgaacggatacattgacaccaccggcaaatgctgcctcgcattccccgttccgcaagctttggcatgccagatgaatggctgttaaagaagaagagcacatcgtatccagagccatgctcgggccgttaaaaccgaatacataggaagccctgttcgcaattgatgacggatttccggtcagcgcaagcgattttccgcgcgcctgttcttcggctccgtaaagctgatattcctcgtacatgacgccgacgtaaacaccgacattggcgccaagcaaatcacccgatttttccgtgagctttttgcgcgtgtaaccggcatcttccatcgtttcgtagacacattgcaggaataaccgctcctgcgggtccatcaattttgcatcccggggcgaaatagagaagaattgcggatcaaatttgtccacgtctttcaaaaatcctccccattttccgtacgtcttgccttctttatctttatcagcgtcgtaataaagactgtgatcccagcgatcgtttggaatttcggttatgcagtcagtgccttcactcaaattcttccaaaattcctgaagattttcggcctgcggatatcgtcctgatataccgataattgcgatatcttcacgctctgtcagctgctgatttttccgcgtgtctggacggacttgcgcaaagccttttttgccttcattccgtttgaaaacgggctttactttcgctttctcagacagcgcaggtttggctgcaggggtttcttctgttttcatcccggtcacttccagcagcgtgtcccggtgtgctttcataaaatactgcgccagcgattcgatattctggtactcgaaaaacaatgtttttgataatgagccgaagctcttttccagccggcccgtcaaatgcataatcataatcgaatcaattccgtaatcttccataggcgccttggcatcaattttgccgacaggaagtttggtcacttccgaaagcacttgtttcaagaaatgctccgttttttctgcaagcatgttctctccgcctgctgtacgacctgccgtttcttccgtttcgctgcccttatccggctgatcatccgctgattttttcagaaacgcccggatttttgcggcgtagccttccgtcaccatgacttgggatgtgtttgccgcccacccgcggtataaagcctgaatgccgttttctgtttgcatagggaccatgccgctttcttttgtcagcatggcttccgtttcagcatcaaccgtcatgccgccgtctttccaaagcggccagcagattgaaagggtatgtccatagcgttcatttcgggcttttttacggtttcttttttcactgaaggcgttcataaacgcattggccatcgcataatcagcctggcccgcgcttccggcgcttccggctccggaagagaaaagaatcagaaaatcaagctcaatgtcctttgccgcttcatcaagatgaaccagcccggagactttcggcgccagtacatcacggatttcatctttgtgctttttcagaatatagttgtcttttatcgttccggcgctgtgaatgataccgtttaagccgccgtactgccgacagatgtcagctatgagcgattgaacttcttgtttttccgttatgtctgtttgtttgtacacagcttgcgcgccgagatcggacagttcttgaagctgggcttttttacggttatccaacagagaacgccccgttaaaataagaacggcgtcttttgcatgccgggcgatttctttggcgaataaaaatccgagtccgcccgcaccgcctgtgatcagataaacacctttatccttccacggcttttcggcgccgaactgttcaagccctgtttcctgccattgtgccgtatagcgcctgccgttttcatagcgaatatgcttgtcatcaggatgagcgctgcattcttttacatatcgggacagcgtgtctgccttgacgtccggctccgtttcaatcagctggcctgtcaggttcgggttttcaagcgccgctgttttcaaaagccctgttaagccgcaaaggagctgcgtatccgcttcttgaggcacgacaatctgaatgagctcgcgcccgccggaatttgaagcgaggattttcttcacttcttcgaacgcctgaagcgcacaagcttcaaaccgttcgtcttcactcttatgctgatcacggagcacatgacagctgaagtctctctgtatgctgttcatttgatccgtaaaccggtcagatatcatcacgtgacgggctttgaaatggatcggcgctttttcatgtacagcggccttctcttcccatacgtgttcaaaatatagtgtatctgttttatccgtttcaatttcccgtgcggaataaccagtcattttcacacatacattgccttgttcgtcacatacatcaatatccagcttctgcacggcatcttcaggcttgctttcgccgctgtacgcaatggaaacccacatattgcttttacagcttttcaacacatcaatctgttcgagagcaaacggcagcatcggccgtatgtcagtcccgtctctgtcaagcattaacccgattgtcgcgtggaaggccgcatccaaaaggctcggatggaggacaaactgatcttttgtatgagaaatagatgacgggagtgagagcttcgcgagcactttgctgtcttttgcatagatttccgtgaccgctttgtgagcatccccgtattcaatccccatttgtttgtatgcctgatagcaagcgtcaggtgtgatcagacggcgtgactctcttaatttgtcaatctcgattttggccggttcgcccgctcggacaaacgctgcgcttccttgcgcatagagtacgggctcttcttccgaggaagccgattcactgtaaaccgtaaatcccatctctccattttcttcgtcataaaggcggagatacagttctgcggactcatctgccgctgtaaacggacgtatccatacaacatgtttcagacggactgttccttcttccttcgtttctgccgcgtgttcaacggccgcccggaccatttccagataagccgcgcccggtaacgtccgctcgtttttgacgacgtgatctttcaggaaaaattctccgccgctaaacgaggaccgaaaacggacgcctgacatgtttgatacattttcatgcaggagcggatgcagcatgcctgcatttttttgcggcagcgattctcttttctccgccttcggcacccaataccggattttttcaaacggatacgtcggcaggctgatccgattcggtttgttttcaccgtacaagagattccaatccatcgttcctccgccggcccacttttcggcaatcatccccagactcccggaagaaagccatttatgtatcaagtccggagcaagctctgcctgtttgcttttatcagctcggttccgccagcacccgctgaccgttttacccgccagaaagccttccagccgctctttgagctgtgtcatattctgagcggtgaacgcaacccgctcctccatctgttcacggccgatctgaagtgtatacgccgcatcctcaagcggcaggccgggatgaataaatgcagacagcttcgcaacatactcttttagccgttcttcattccgggctgaaaccgggaaaatgaatgtctgttcttctgccggttcagcatttgttccgtgtgattcttcagggataaattcctccagaatgagatgcacgtttgaacctgtcgccccgaaagagctgatgcccgcacgccggggatatacggtttcggttccgttttccgtcactgatggctgctgccatgcttcggtatgatgctggacgtaaaacggtgattgttcaaaatctaaatacggattcagctcctccgaatgaagagacggcaccaaagttttatggtgaagctgcagggcaaccttgcttaagccgctgatgcccgcagccgattccgcatggccgatattggacttcactgatccgatcgaacagaactgtttgtcctgtgtgtactggcggaacgccttgacaaggccttgaacctcgatcggatcgccgagagaagttcccgtcccgtgcgcctcaatataactgaccgtgcgcggatcgatgcccgctttgtccaggcattcttcaatcaaatcagcctgcgcgacaggactcggcacggaaattccgctcactgtccccacgtgattgacggcactgccctttatcaccgcataaatccggtcgccgtcttttaccgcctctcgcagcggttttaataaaacggcaccgattccttcagccggtacatagccgtctccgtctttcccgaatgtatgacaaaccccgtctgttgaaaacatgtcccataaaccgtatgtcagatatttattcggatgcagcgacaaattgacgcctccggcaaccgccgattcacattccccgcgccgaatgctttccgcagcaaggtgaaccgcagtcagcgaagatgaacagaccgtatcgaccgccatgctcggcccgtgaaaattgcaaaaatatgaaactctgtttgcgatttgcgcataattaagagaaagcgggaatacatgatcttcagaagaagcttcagccccgaccaacgtataatccttatgcatcacccctgcgaagacgccgacgcgctgtctcttattccgtccgcgcgattctgcgagcgacttcggcgtatatccggcatcctcaatcgtttcccagcatgtttgtaaaaacagccgttcctgagggtccattgtttcagcttcccgcggcgtaatccggaaaaattggggatcaaagcaatccggatcatcaataaatccgccccattttgaaatgctctttccggaaggcgactttacattttcaaaccggcgccagtcccagcgagactccggaatttcggtgacacagttttttccttctttcaggttttcccagaattcatgaatattttcggcctgcgggtagcggccggccatgccgataatcgcgatatcttcatcttgcggaacactgcttttccgtcttctctctgtttgcggctcaaccggcttctccatttttgccggagacgcgctgaaatggctcccgtactgctcagtcaggaaagctgccagctctgctgccgtcgtatattcaaacagcaaagtcggagaaagggtttcgccgattttttcgctgatcgtttcgacgacgtcaagcagtccggacgatgtcagccccatttcatagtagccgacttgagaatcaatctgttcaagcggcttgccgattttttccgccatcagattcatgacataccgttccgcttcctcatgcgggtgtccgccttcaagcgatgccgcaacttccggtaaaccggctttttcaggagatttctcagcagtctttcgttctgtattgatcagctcggcatcccgcacgagcttgcttgtgaaatctttcagctcggctacttttcggccggatgcgttaaaaaactccagtgtaatgtaaatgagctccttttcctgccgaagcgacgaacgtttgattctcgtgatgcagccggcctgcaaaggttcggaagctgtaaaagattcgtagaaaagaggcagaaacagcctcttttccccatttaacagcgatgagatcaataggtttgcgccgacgccgcttccgtcaaggagagtcggatggaacaaaagccccccggcctgtcccatcgcgtcttttccgagcgatacatcaaagatgacgccgtcccgctcctcaaacacttctccttctgctttcatatatccgctgtgaaccaattcctggcttctgcattgtgcatacagctcatttaaatcgatggtgcgttccgcctcgcgtttgacagagtcaagatcaagcgtgtcactgaaaattgcgggtgccgtctcgtgcatttccgctttgacgtaaatacgttcttccggctgtactcgtccgccgctgacctcagccccttttgcggtaagtttccagcgcccttcttttacctttgtacattcgaccgtaagcttgacggcgctgtcttctttcgcaataagcggctgatatatggataaatggcgcagctgaagcccgtcgtatgaatagccgcgctctttgaaaatctgataaaacatatcaatataagccaatcccggaaggactttttgtccgtaaacgtcatgatgtaaaataaacggatttttcagcgataaagtgatttgcttattgaagttcttcacgttaaacctccacttcataggtatcccagatgtttgccgcagctttttcgttcgtttcttctttgctgtccggcgaaatcagccgcttatttaatgcaggcggtgttaaaggatggcgcttgattcggcgcccttcgtcttcctgccacgcttccacaatgacgtgggcgtttgttccgccgtcggcaaagcagttaattcctgccgccggtattggtgacggccagtctgccagagtgcggctgaactgaatattggccttttctctatcaaaatgtgtgttttcatgctcgcctgataaaaacggaataaagctcttttctttcagcatgagaacaacttttatgaaacttgcaattccttccgcgcaaagcgggtgcccgatgttcggtttcacagatccgattccgagcgggccggcgtcttttgaacggtagacggattgaatggccttcagttctaacagatccgtcacgaccgtgcctgaaccgttcgcttcaatatgagtaatgtcttccggctgttttccgcttttttcaagagccgtcttcatgacggatttttgcgcttccagactcggcgtagccgggccggccgttcttccgtcattattgacggatgccgccttcactacggcataaatagaatctccgtcttcaatcgcctgagacacggtttttaatagaaccattccgacaccctcgcccagcacgactccatcggcgcgttcgtcaaatacatggaacgactgcgctttacttaatatgccgcgctgttcaaataatttatgggtttcttctgattcaaacaggctcacgccgccgacgacggccgcttttatttctcctgttacaagagcctgcacggccatattcattccgactaaagcagaagaacaagccgtatcgaggacaacgctcgggccgcgcatatcaaagtattgagagagattggcggccaaataattctggccaagcgcgacgatcgggtttttcgcgtccagcagtttctcttcacccggtctgtgacggctgcgtccgccgagatacacacctattgcttctccctttatctcatccggcgtatagcccgcgtgataccacaggttaagacattcttccagagcggccaaagcttgagggtccattgcctttacatcttcttcagccagtaaaaagaagtccggatcaaattgatgaattccatcaagcattcccgcgtaataaggcgtcttcaaaccccatcgctcagccggaacaggaccgatagccgaacggccttcagccaaaagcgaccagtatgcctctaaggaagccgcccccggaaaccggcaggacatgccgacgaccgcgatatcttcccggtgaatctgtttttcggccggctcttcttgcaccttaacggcttgtgtttcaattaccggctcagccggcttcttcataacaggctccgccgccgccaaatcaaaccgttctgacaaaacttctgtatatccttcgagaagccaatttgcgaaagattgaatcgttggatattcatacagaatggacgggtcaagcgatgccgagagattccgattgatccgctgcagaagctgggcaaggataatggagtccactccgtaatcttggaataatacgtctgtctcaagctgatcctggtcaatccgcagctcttcagaaaataattctttcagccattcttctgttttccttgttaattgagcgttgtctgcggcagtatcagcggttttttccgccggttttaccatagccggactcattggctgatcctgcctgctccgccgcaggaatcgctccggcttccacagcttaggattcagaacggccggcagcaccgggccccttgctgattcaataagtatgccgtcaaggagctgtaatccttctgcattcgtgatgctgtatagcccgctctctttataagctttgttcgttacttcgcccattccggtttctttccagttcggccactgaatgcttacgatcggcagctgctctttgtatgagtttgcaaaatagtccatatacgcattggccatggcatagtcggcctgtcctgccgaaagcgccggtatcgcagctgacacggaagagaacaagacgaaaaacttcagcggctcttcgctgagcacactgtataacgcctgaagcccgtctactttcggctcgagcacgcgctgtatgtcttcatcggtttttctgatgaatgcgagcgtctctttatcggtcacacccgcgcagtgaatcacgccgccgataggtccgagcgtctgttttatctgactcagttcctgtctcagcccggcttcatcagctaacgggactgacaataccttcacttgtacacctttggattccaagtcgagaacagcttcaattttcgcttttacagaagccgtcaccccattcagtccgcctgtccactcacttcgcggcggaagggtctcacgtcctgtaagcaccagttttttcactccgtaatgttcggcaaaatggcgtgcgcataaaagaccgatccctctcgtccctccggtgatcagaagcacatggttgtccggaaaatcaattctctcgccttgcatattcatattttctgagccgctcaatacggcgcggtagcgcaagccgtccctccggcaaacttccgcgtcatcagtacgggcatgaaactcatcggcaatctgcttcgccagtttgtcatcagaaagcgctccttcaaggtcgagatgccttgaagacagatgaccgtactcacatgccagcattctgtacagaccggcccgttttgctcctgttgtttgattggcctctttatttaatgactcaaggtctttcgtgacacaaagcagtgttatcccttctttatgcccatgctcaatcaattgctgaagccatttgataccggtcatatctccagaagcttcttctttcgctgcgccgagaagatcgatgactccgccaaacgcctgccagtcatatacaccggtaaggtctgatgttgtgataatacggtgattcggcatatgcgctgcgatctcttctgcgagattgatcgtgtccccgcctgtcaaaatcgcaacggaacgtgggcacggttcacgcagttcgagcgggctcggttcccattgtttcgtcagaatacgtttcatccgttcctctgtatggaccttatttttgtcaggattctccggtacccaatacgtgtcttttgcaaacggataagacggtagactgagtaaacgcggcgtacccttttcatacagccggttccaattcaacacaccgcctttcacccatacctctgccagcttggcgaatttgccttttctgatccaggcgtcaatgacgatgtccatatcttcatctgccgtgaacaaggcaaacgtatctttattgcggtgagactggccggtatacagcccggcgatgtttttctcatttttcgtaaatgcttccagctttgtttccaattccgccatcgtcgctgcaagaatggccaagcgctcttccatttcgtcccttccggtttgcagcgtataagcgacgcccgccaagtcttgatctgtatacggcgtttgacggatcgctttttgcagctgctgcgcctgttcaaacaatttttcttttgatttggcggacaaaaggatgattgccggattttccgggctatgctcaggctgagcggctgctttcgggacatactcttcaatgacgatatgggcgttgaccccgccgatgccaaatgagctgaccccggcccggcgcggaatggcatttccgtttctatcttttgctgccgtccattcctgattttcccgcacgatgtagaaaggactgtcatcaagctgaatgtacggattgatcgtctcgcaatgcaggcttttcaccagcgttttgtgcttcatttgcaaaagcactttcatgacgcctgatactcccgcggcaagctctaaatggccgatattgcttttgaccgaaccgatgccgcagcggtgaccggagacttcaggctcttgatttgttttcgccagctcgtgaaacgccgctttcagaccatttatttcaatcggatcgcccaattccgttcctgtaccgtgcgcttcaatatacgtgacggtgctcgggtccactcccgctttccgatatgctttcaccaataaatcagcctgcagtttcggattcggcgaggttaacgtattcgcccggccgccgtggttttcagccgtaccgcggatcacgccgtaaatcggattgccgtcacgttctgcatctgtcagtttcttcagcatcagaattcccgcgccttctcctctgacatacccgttggcatccttggagaaggttttgcattttccgtctttgctgagcatgcctgctttgctgtagctgatatgcgcttcttccgtcagaatcgtgttgattcccccggcaatcgccatgtcgcattctccgttttctatagcggataccgcccggtgaatcgccacaagcgagcttgaacatgccgtttcaatcggctcgctcggcccgtgaagatttaacaaatagctcaaacggttcggaccaatggaaggaatcatgctgcctgtcgccgcatgtccttccggcgcaagacctgcccttgtgaacaaatctttataaccggtatttccggtgccgataaatacgcccgtatttgtaccggaaaggctttccggcttacagcccgcatcttctatcgcccgccatgcataagtcaataacagccgctgctgcggatctaaatattgggcttcccgcggtgaaatcccaaagaacagcggatcaaattcagctattccgtcgataaagccgccccacttgatattcgttttgttcccttcaagattcgggtcgccatcaaacgcttgccaatcccagcgttctttcggaatggttgtgatcgaatcctttccttctttcaaattgcgccaaaattcctctatatccttcgcgcccgggaatcggccgctgattccgacaatggcaaccgggtccaagcggcgcggctcttgtgccgctgccctagcgttcattaccgttgcgaagcgctttttccgatgcattttcggtttttgggcttttggctgctcttttttcggagactccttcttcttttcgccgaaacggcccggatgctcttttgccaaatatccggcgagattactgatcgttccgtactcaaagaaaatcgtcggcgccagctccagctgatacgcttcatttaattgattcgtaaagacggtaaaggatacggaatcaaaaccgtattcactcagttccgtatctgtctcaatgtcctcacggtcaacttttaaaatgctgcttaccatggctgtcaaagcggtgtgaagcgcttgaagagattcttctgcatcgtgtttttcttccggctgaaaaggaaggccggcttctgcctcatccgtcaaatactctgctaaactgcggatcgtcccgtgttcgaagaagatcgtcggcgccagctccagctgatacgcttcatttaattgattcgtaaagacggtaaacgatacggaatcaaaaccgtattcactcagttccgtatcgatatcaatctcgtcttggccgacttttaaaattgaactgaccaatctgataagcgcaccgtgccatttgtctcccgaaacggcggatacaggctctattttctccacctgcggcttttcagtttcagaaacggacaggaacgactgttttaattttgctgcgtgtccttcagctgctaaaagctgcggcctttcctgagccattccttcataaaatgcagccaggcctgacgccttttgaagtggaaccatgccgaaagcttttttcatcattctctccgtctcgtctcccgcctgcataccgccatctttccacagcgtccagttaaaggcgatcgtttttccgtgccgcaggccattctccgtaagggattgcctgtaagcggcgtatgcatccataaacgcgttgccggcggcataatcagcctgcccgacattgccgagaacgccggaaacactggagaacaatacgaaaaagtcaagattgcagtctttgctggcttcatctaaataagcggttccgatgactttcggatcaagcacttccctgaactcttccttcgttttttgcagcaggaagcggtcttgtatcactcccgcagcgtgaataattccgttaagctttccgaattccgccgtaatctctttgatcagcgcttcattttcccgccggtctgccgcattcagctttttgtagacgacatttgcgccggagtgctgaagcatagcaagctcacgctgtttggcttctgccagatttgagcggccggtcagaatgattttcgggtgttttacgcgacctgcgatttcttttgcgaacatcaagcccaggcttcccgcgcctccggtaatcagatatacaccttcgtccttccagacgatgccgccccctgcgggatgcatttcttcccaagccttcacataccgtttttctcctttataacggatatgtttatcatgcggccgatgactgtcgtttttcagtttttgagcgacagccggcatttcgccgattgattccatttcgatgagctgacagtcaagttttccgtattccagctcggctgtttttaacaaacctgttaaccccgcaaacaattgctggctgccgtctgctgagataacggtctgaatcagaatgcggccctgccttttttcgctgatgatccgccggatgtgttcggcgattgtctgcgcaaagctttggaagcgttcagcggctgtttcaccctcaccttctgcaatcaacagttcggcgtctttcaggccggatgccgcttcatcttttatacggcaggcatcttcacaaagtatgatcaaatgctcatcagcatggacagaagctttctcggatgcggcggcttctttccagaccggtgcaaacaagaccttttctgagcctgatagccgctgagccgattctgcatcgccttcaagcactctcgtagagaatcctctcaccttcacgcaaagcgctcctgtttcgtcgaacaggtcaatgtcggctttctgcacggaatcaccggtttgatatccatcgctgaagcgtgcatgcgcccgcatagccggcgtgcatgctttgatgacttcaagatattccagcgcaaacggcagaatcagcttttgtccggaaaactcctgcataatgcagatcgtcgccgtctgaatagccgaatcaatgatgctcggatgaagcgtaaattgttcgttcgtgtgagaaacagaatccggaagctgtatgtccgaaagcacttctttctcgccgataaaggcggacttaatgccttggaaggcttttccgtggaacatccccctgctcctgccttcccgataaaaggccgccggatcaagaatatccgctttgcatctgttttgtatggcagaaaggtcggcctcaggctcttgttcagccttaatgatttcggcccgtccttggctgtgcagcacttcttcatcctcagcgtttacgctgtatatgtcatatgagatgatgccgtcctcttcagggaacagcgcaatatggacctggcgctcttgtccgtgaacgacgatcggtttcatccagaccgtatgatggagcgttattctgtcttggtcttttaaaaagccgccaagcccccgttttaccgcttcataagacatttccaaatatgccgctcccggcagcaccgctttttccctgaccacatgatccttcaggaaaaattctgagcctgtaaaccgtgagctgaaccgctgaacggccaaatctgacgtattttgctgcacgagcgggtgtaaaactgagactccggtgtgtgcggcagatgtgttcttttctgcttttttcggccagtacggctcctttgcaaacgggtagaccggcacgctgattcgtttcggatgcttgtctttgtaaagcttgtgccaattgatggcgacgcctttactccacatttcacagagcttcggtccttttcctttcgcaagccatttctcaatgagttcagcgctgtcatcatcatcagaaagccaggcaatatctttcacctgctgtttttctcctctgaagcagcctgttacagccggcttatcattgataaaatcggcaagctgccgcttcagctccgcagtgccgcttgtgataaaggccgcacgctcttccatcgcttcccttccgacttggaacgtgtaggcaagatcagcgaggccggcgtccgtttttctttccagaaaagccagcagctgttttgcgtactccttcagacgatctttttttctggcagacaacggaatgatgaacggaccggcagcgtctgctgcttcggatgcatccggatattgttcaaaaatcgcgtgtgtgtttgttccgccaagaccgaaagagcttaaagccatgcggtgcgctctgttctcacgggttaactctttcttttctcccgctacgtaaaacggagagtcttctaaatgaagattcggattcggctctttgtaattgatgctcggcgcgatttcctgatgatataagctcatgacaaccttgatgcagcccgccattccggccgctgtatccaaatgcccgagatttgttttgactgaaccgatgccgcagtattgttttttatctgtatatcggccgtacaccgattgaagtgcggacagttcgatcggatcgccgagttttgttcctgtgccgtgagcttcgacgtacgcgatcgtttcgggatggatgcccgtctgatcaatgaccttctgaatgacctcagcttgtcctttgacgctcggcgcataaaatccgaccttatccgctccgtcgttattgacgccgattccgcgcagcagcgcataaatatggtcgccgtccttaaccgcatcagacgcttttttcaagagcacggcgccggccccttcaccgccgatcattccgtcagcatccgcgtcaaacgctttaatatgcccgtcgctcgaaaaattcagccccggctgatgaacatacccggcgcttgattccgtatgaagggtcgcaccgccgacaagggcgtacttggcttcgccggactgcaggctttgaaaagccgaatgcaggccgattaacgaagatgagcagttggcatgaacaaaatagctcggccctttcaacccgagtttatgagaaatcatcgtcggaatcgtaccgctttgggcaagcacccatgacacgtagccatccggcgtttccagctgtgctgtcgtctcccccggcagcaggctgcggtaagagttcgtgctggcagacatatacacgcttgtttccggaatttctttggagatataccccgcatcctcgattgccttccatgaatggagcaaaagcattctcagctgagggtccatatattccgcatctttcggtgaaaagccgaagaaaccgggatcaaacatttctttcccctctaaaactgatttagccggaacgaagccgggatgatcagccagttcttcagaaataccgaatcggcggagctcttcttttgaaaagaaggtgatgctttctttgccttctttgatgttattccaaaattcataatgatctttcgctcccggaaactcacaggatataccgataaccgcaagactgtcctcgtaataatcgggaaattctcccgccgggtgttcccggtcttctgcattcactttcttttgcggtacaggagccaaaacggcttctttcggtttttgttcagcgatataccggctgatgtcttttaccgtcgcgtattcaaacagctccgttacactgaattcacaatccaattcctgcgtcatccggtcagtgacagtcacggcaagaagcgaatctccccccgcatcaaaaaagcggtcatcaagctctatatctttgcttttcaatacatcctgccaaatcgccagcaccgcctgctggatatgagatgatgaaaatgtttgtgtgtccggctgcttttccgtcagatcgcgggcagcaagaagcttgcggtccacttttccgttcggtgtgagcggcagctcttcaagacggataaacgaagctggcgtcatataggccggcagcgcttgtttcaaatgattgcgcaattcctttgcagacggaagcggctctccgtttttccggatataaaacgcgcaaagcttctcatttccggagtgattgttcacaaccactacactttcctgtacggccggatgggcattcagcctgctctcaatatctccgggttcaatgcggtagccgcggattttgacttgggtgtccatccgtcccatgtattcaatgcggccgccgggaagaaaacgcgccatatcgcctgttttataaagctttgatcccagttcgagccggtggctgacgaaagctttatctgtcagctcaggcttgttgaaataccctcttgccaatccgtctcccgcaatacaaagttctcccggcaccccttctaaaacagggttgagaccggaatccataatatacacgcgggtattggcgatcgggcgtccgatcgtaagcgcgctctcattctccgttatccgctgcaccgcggaccagattgtcgtctctgtcggcccgaacatattccaagcctcacttttcgtatcgagaaactgctgcttcaattgttcgctaagggcctcaccgccgcaaaggattttcacattttcttcatttgaccatccggaatgaaagagcattttccacgtaaacggcgtcgcctgcatgatcgtcggtttgtactcttgaatcagctctttcagcttccgtgcgtcttttgtgacttctgtcttacagatgttgcactccgctcctttgattaaaggaaggtaaagctccagtgccgcgatgtcaaagcaatatgtcgtgacggcaagcagtttgtcttcggacgaaagccccggttcattcgccatcgagagtaagaaattggtcagcgcccggtgcggaatcatcacgcctttcggtttgcccgtgctgcccgacgtgtaaatgacatacgccagatcgtcaggtgtcactaaccgcttcagcgacgttctttccgcggctgtactttcaatacgagaccaatcgcggtcaatggcagttgtctgcacgcctccccagttcaaggagtgctctaaatcagctgtcgtcagacacattgaaatcctgctgtcggtgatcatatattccaatctgtcagcgggataagaaggatcaagcggcacatacgctcccccggcttttaaaatgccgagaaggccgacagccatatgcaatgatcggtctgtataaatgccgatgagatcatcagggcctgcaccgtgcgcctgcaaatagagcgccagcttcgtgcttttttcatcaagctcacggtacgtcagcttttgctcttcatacacgaccgcacaagcgtccggcgtttctgccgcctgacgttcgaataattcatggaagcaggcatccggatattcacggcttgtctcattccaagtattaagaatcatgtgctcctctctttttgtcatgagagaaacgttctcaagcggcgtatccggattcgccgtcaaagcttcagcagcctgtacaaattggctgaaaagtctggccgcccctgcttcgtcgaataattcggtgctgtatttaatcgtaagatccatgcctgatgcttcttcccacatttcaaatacaagatcatattccccctcttgatgaatgtcttttacaaactcacaggagaattccttgtattcatcaagcatcgattgatagctggaatgctgcagaaagttctgatagaaaaaggcattgctgaaaacaggcgaaccgttctgccggggtttcgcatgcacatcacgcaccattttcggaaacggataaaaggagtgatccagtccgtccagaacggcatcctgcaccttttgaacaaagtcagcaaatgtttcttttcgtccggctctgctccgtatgggaagcatgttgaggaaatggccgaccactcggtcaaaacgttcttcgggtctgaccattgcaggcatgcctgtcacaatatcttccttatccgtatatttgcttaaaagcaccatgtaacagctcagcatgacggtagacaaatgaatcgaacgggatgcggcaaacgccgttatattattcagcagccgttcgggaagacggcgtgtcagtgtatcttctgtaaactccggaacactgctgtccgtgcgcatcggcggaagctgaaggtcaggcagatcgccctcgagctgtttcatccagtaagcgcgggcagctttgctttcttcacccgctaaataccgcttttcccaagccgcgaaatcgggatgaataccgggagcggcagctgtaaactcttcttttccctccagcagcgcctgataatgatccagcagactgtgaataaatgtaatggatgaaatgccgtcaaacacgatgtggtgaatgaccgtcaaaagataatgttcctcggcggattttgaaagcagctgcacgcgcagtaaaggtccgctttctttgacaaacggctctttcacttttttccgtatcagagcggatatttgtgattcattgacgtcagaaatatcttcttccgagaatacaaaaggatctgccgcttctatgaaataaaacccgccgtctgtttcattcacggcgcttttgagcatcggatgctgctttaatacgagctgaaacgcctgtttcagtttctctttgtcgattccggatgtgaatcggaaacagagcgggacatggtatgcagtcgtttcaggcgacattttctgcaatgtccacagccctttttggacttctgaaagcgctggcgccgtttgccgtctctcccgttctgccggcggttcggctttttggggatgatggtccgctgacatgtttgccgctttttcagcagtataagccgctaaagcgccaatcgtcgggtttttgtgcagctctcttgccgtcagccggatgtgatacgttttttcaattgatctggcgagtttcatcatcttgatggaattgacgccaagactttgaaacggcgtatttggatcaacgagctcatccgcgatggaaagttcctctttcagaaaacggataaaatcccgttcaatttctttctctgcagaagccgtgtctgaattgctgccttcttgtctgttattatgtaatgaatcaaattgcccttgttcaaatgaatgtttcagctgagtgcgctggattttcccgatcgccgtcttaggaatgtcttcttttgcgaccggaagcagataatcaggggtaacgccgattctctgtgtcacgtgctggtgaatgtgatgaagaagcttcgtcatgcggttctcatccaacggaacagatgtcacaaagaaaatcgccagctcatctgtcgtgctttgattcggccggacggcgcatgccgctgtatatgacgtttcaatttccggcaattcctcaacggctgattcaatggcatggctgtaataattcacaccgttgataatgatggcatctttcgtgcgccccgttatcgtcaggcggccttcacgcagaaatccgagatctcccgtttcaaaccagccgtcttctgtaaagacactctcatttaagtccgggcgctcataatatccgctcgttacagtcagacccgacacttggaagcggccgatttctccttcttccaccacttgattgcggtcatccgtaattctcatattaaatcccgggatcggcagaccgatctcgacgaaacgatcgtcgtcactcgtgttttccaatgtaaactcatctgagaaaataacgcccgaagacgtttcggacattccccatgcgggacggatggcattagccggcagaccgtgcggctctaaaagctccataattctgcgtccgactttcgcaaccgcggcctccccgccgttcagcatgtaacgcatggaagataagtcccatttccgcgtttgaatctcttctgcaaaatcagcaagcagcccaaaggcaaaatttggggcccacgtgaccgaagcgcggtaatgatcaatcaggtcgagccattttaaagggtccatcaaaatggattcgctcggtatgttgatttcctcacatccgagataaacatcacgcagatgaagcattccgatgccgccgacatggtcaaaaggcatccagttaaacgtgacatcctcacttgtatagccctgcatctgaatatttcctttgaccatgcagacgatgttttcatggctgagcatcacggctttcggcgtgcccgtgcttcccgaggtcaaaagcagcatcgccaaatcttccggacggggatgatgacagtccgtatccatttcgtgcgcactgagatcttctgccgccaaagcgcaaaacccggaaagctcctgctcctccgcccattcagtcatctccggcagcacgtcacggcttgtgatgacatacggctgattcaaaagcgtccaggcgtctttcagtttttgcgtcccgctgttcatttctgtataagccggagcggccgcaagcggaaccgggatcgctcctaaaaaaacacagccccaaaaagcaggaatcaactgggaattgtcactgagctgtaatatgacttcatcctgagccttcactcctgattggcggagccctttcacaatcgaaagagcgatctttttcaggccgctgtaagtctggtacactttggtgccgtcaggctgtatatatgtgatgcccttttgatctcccgctgccgcggcggttttgtgcaggacttcaggaatcgtcatcggctgatccgctgaaagccgcaatgattttccatagctgacagatggcttgagtaacccgcttgccttcatatcacttttcatagagctgcctccatttcatctgtatgtaagatgtatgtcttatactccgtacatcgtcgtgattcgttttttcacttcatcatcatgaaacgtctcatcgtgcatgattaactccttctcaatgacggccggaagctgctcgcgaaacggcgtcactaagtgccttttcaatgtaattaaagagtttctcggtttttccgcaagctcacgggccaattcctgcgcatagtctagtacttcctgccgaggaagcaccggaaaaggcacccctcttttctccaggtcaccgccgcggtagtggccgccgtttaacagcatttcatggccgaggcttgccccaagcttctccggaacgataaaggtagcgcccattccgggggtgaaaccgtatttcataaagtttgcggtatacacgctttctttgcttaaaatgacaaaatcactgaaaagccccatgacaaacccgcctccgattccgtgtccctgcatggcggaaatgacggggatatcacattccagcgccaaagagtacatgcggtcttccgtaaacttcgtgatgccctgctgaatcctgagcaggccttcctgtgtgcctccggaagcaaagtaatggccgtaccctgttaaaatcacagctttatagactgacgatttttttatacgggtgaatgcttccatcaatccatccgtcagttctttggagaaggcgtttttatgggctttatcctgcattgtcacttggataatatccggttcaatttcgagcagttcaactgcggcgttcggcatgatatcctcctaactgttctccgtttcccaaggaagccgccccgtttctgcataacggaagatggctgattggttatccggatctgaaaacatcgcttgattttcggctagagcaatggatttcgaacgatgaacaaggtcgtttaaggaatccatgtattgtttatagcggatgactgcttttttcgacagtgggcggaggcgcagcaaatgctttctcagctctgttgctgagtccgggacgcatacgtcacaaagtccccattcaagcgcctggcgtgccggcacgggctttgtcatgatcgtcatataatgcgccttttgaaatccgattctttgaattaaaaacggcagaacgcaggccggataaagtccgaataacagttcagataaactgaacgaagcattctcctctgctatgacgatatcgcacgcggcggcaaaaccgacacctcccgcatttacttgtccgcggacgcgggcgattgtgatgtacggcccggattttaatgccagccacaaacggtaaagcggctcctgcgattccgcatgctgcattccctgcctcattctccggtacatctcatcaaaatccgccccgaaacaaaatacctccggctgcccttcaagcactacggaggtcacggagtcttcacattcagaaagaacatgcaggcattcctccactaaacgctcattaatcgtattgttggcttcaggccgatcaaaggtgatgaagcagacattttgctgaaaacggacgtttatcgtttcataggtcacgatatccacctgtatttccgatgaaattccgtgatttcttccaaatataaacgagggctcccggcatgatggtctaaaatgttcggaatcatattcatatccaatttgacattccgggtaccgaacttcaccagaccgctgcctttaaacagttcttcatattcttccatggacagcctgtacctgttgttcagatgctcttctattttgaaagaatgctgccgcgcttgcccttcaggcgtcacaacgccgctgtaaaattccgaacagcatccggagccgtaggagaaacagccgatccgcttagaagtgccgaatgccccttggtcaatcgtgcttgcaagagccagtaaagaggctgcccccataatgtttccgactctttggcagtagcggagccccggctctactctggtttgaaaatcttgttcgatctcagcgtttttcgcttttgcaagcttgcgcatcatcgtccggtgggcccctttgaccatgccgccaaacggtgtatggaaggcaagatagtgaaacgtctctttgtagtcagcgcccggcacacggtttttgtactcgcgaaatgtctgttcacagcaatcgaggtaagacatcaatgacaaatcggcgtcaccggcttcactgtccgggatcggacggcatgtatccatcacctcatagccgtagtagccgttggcgcccgcatccgcctgaaatacgattggattttcaccgatcaataaggcgacggcacccgctccagcgctcggttctgcgtaagaccaatcctcgcttaacgcatcgccgccttcggcaattaaaaaccgggaaatatccgtcgcgacgacaagcgccttcgctccgggggatgtctgcgacaaaataaagttaagcgccatctgcaaacccgccgttcctgaataacaggcttgtttcagttcaaataaacggcagttccggttgaggcctaagtaatcatgaatatatgtactgagtgattttccgaagtcgatgccggactccgagcaggtaatcagcagctcgattctgtctttttcagcctctgtcaatcggtcgataatcggctttgccgcgttaacgccgaatgtaacggggtcttcgtacggaagcgccaccgctttttctttcatcagtaaattctcaaatctggcagggtctaagtttctgtactccgccagctgcatgacatcaaggtatgctgtcccgccaaacacatttatcgcttctattccggcagccgccatgaacttcgcctccaatatgaattttgagtttccgattatttcaccgttttatcagacagcctgtaccttttcataaagctttgccgccaattcgccgatgtttgacactcccgtcagctcaacacgcgggatctgcagtgataattcttcaagcatcatcgtgataatttcggcgcggtccactgaatccgcccccagatcaactaaccggtcttcctgcgaaagctgttcgccttctaaatcaggtaaaacctcgtagattgtgttctgcagcaattcaaagattctttctttactcattgtcagttcctccctgtttcatcttttatgaatattccatgttttcaatctatcatttcgtcttgtcaacacgtttgcaaaaatgaacctaacttctgattcaaaagcgaggccgtctcttccataagccgcatgccgataccatcggcatggcggtttttccaggactccagctccgtacctttcacccattgattaaaggcgcctaatgccgggccgcaatgaatctggaagtctaccttggcatccgggtctcctttaatcgccgaagcagagctttgcctgaaataccatttgaatatgagcgccattttctgtttcggattccgttcggcttttgaaatgtcttcattcgaataatgagccttcactttgtcataaatactgcttacacttgccttaaaatacttctcttctatttgtctgagtgtcttttcatcaatttcttcaattgagcggtgacgctgatacagttcatgcagcttagaggcgcgggtcggaaagaacagccctttctttaatacctgcaccttgctgcctgattcaaacatatcgccggccggcgcgtaggccgtgtcctgtacattcatctgctgcaggaggtcctttacgaggccgctcgtcgctgcctcaacggtgcattggttaatagatccggtcacaataaaatcagcgccgagcataaatgcggccatggcagcctcgggcgttccgattccccctgcggctccgatgcggacagttttgccgtatcggtattttttcatcatgtcatctcgtaaacggatgatcgccggcatgagactgtaagcaactccgccgtcagtgtggccgcctgaatcagcctctacgcagatgtcatgcgcaacgggtatttctctcatcagacttgcttcttcagcggtaattttgttttcggctgcaagtttctgcagaatgtgatcaggcgccgggctgagaaacgcttccgctacttccggacgggacagcttggcgataatccgctgacgcgctattatttgtccgccggcaccgcgttttaaccccttagcgcgaaaccttactaaagcgggagtaaccgttaaaaacgctgatgcttccaagttctgaaccccatgcttcagtaaaagatcaatcattttttcttctgaatctgtatgcttcatgttatgtacaacatttatgccgaaggaaccgccgtcacgaagctcatgctgaattgacaaaatgacgtcctcaacgtgcgcgatgttcaaaccgcccgttccgaaaaagcccatcattcctttttcagccagtttgacaaccatttctttcgaagaaattccgcggtacatgccgccggccaagtaggcgtatttcaattgataatcgcgcttaaactcttcatttcctaaagacgccgccgtaattgagctttttccagcctcagccgggactttgatttcatctgttatcggctccgcttcagccgtaattctttgtatcagccccgtcagcacttttccgggaccgatttcctcaaagctcatgttctttcttcccattaagaaacggatgctgtctgtccagttcaccgatcccgttatttgtccggtgagtgtctctttcagctctctctgctcatagggtcttgccgtcacatttgaaatgaccgggatggacagcggcttaaaatggaaagattcaataaaccgtgaaaactcttccttcgcttccagcatgtatctggagtgaaaggcgccgctgacatttaagcggtgaaccatttttacgccgtttacggcttcaaaaacggatgctgctttttcaatatcttctttatatccggaaatgacaatttgctgcggtgtgttcatgttggcgatatcaatcatatccaagtgattttctcttaaaacatccgtcacctgctcatgagtcaggccgatcaccgctgccatgccgcctccttttgcgcggctcatcagttcgcccctttttttgaccaactgtaagccttcttcaaaatcaaaggcgcccgaagcgtataacgcgttatattcgcccaaactgtgtccggcggtaaaatccggtttcaagccggtttcttctgtttttttcaaataactgagggcattgacgacatagagcgccggctgagtgaattgagtctgattgagacgttctccgtcccggcacagctcctgaatggaatatccgagaatgtgatcggcctttgcggttaattcaggatagcggccgaacaggtcctcccccatccctattctttgcgagccttggcctggaaaaacaaagctgatcatcttacagtctccttccgggcggtgataaaatgctgtcttctatttgctgcaaatgtgtttgttctttatgaaacggcgtcataatggcacggatgcgttcagccgatcctgcaggaagaatctgtttggcaaatgcggccaatgttccggaaggcccggcatcaatatagaatcctttttggcggctgtctgcgaattgaagcgcttcgcggaatcgaatcggctttcttacgatatcccagaaaaagtccgcttgtatatcggtctcagcctctccggtcgcactggagatgtacggtataaacggagtccggattgatttctgagctaaaaagcgcttgtacggctgttccgcctgatcaaccagcgctgagtgaaacccgtaagataccggcaatagctgatgaggaatctgcttttctctcagatcgtccatgatctttttgatatgttcccgctctcccgagatgacaaagtgagaatgatagtttacagatgccaattcactatgttcgccgagcagcggatcatcttgatataaagccggatcacccagtatcgcaagcatgctgccgttacggcaagtttccgtaacgattcgggcctgttccagcacgcaatctaaagcatcctcggcgctcagcacgcccgacacagcggccgctgcatactctccgaggcttgctccgatcacataatcgggacgtatgcctctttgctccaaagcatatgcaagtgcgtactcagccataaaaatggcaggatggctgaaaagaaggcggtcaaatggatcagacagacgattgcctgtatgatacatctctttaaggacagagtaaccgaaacggctgactgcaaaatcgtccaagtcaagcattttctgccgaaaagcggcgttatgtgcaaacagctctttccccatttgatagtattgggaaccctgtccagaaaacatgaaaacaattggctggttcatttgttctcctttttgctctttattttttcaaaatattgatttgtgagtttttcgtgatgtcgtgtgcaggtgaagtggtcgtgatgttgtatggctggcactattgtgtgagataagaattttgacttgcgttccgctacatggcgggtgaagcttcagtttcttttttgatgcggtgaataagtcctgtcagcacatggcccggtccgacttcttcaaattccatccgccctttgtccagcagatagcggatgctgtcgttccatcgcactgaatggtcgatctgatcggccagaacggagtggattccgtcttgctcataaggtctggcatgcacattagaaatgacaggaattgatatagcagaaaaatgaaatgactgtaaaaatttttcgaactcttgttttgcttcactcatatacctcgagtgaaaagcgccgcttacgtttaacggatgaaacatcgtaacgtcttttaatccttcgaatacgcttttggctctttcaatgtcttctttgcgtccggatatgacaacttggtgaggagaattcatattggcaatatcaattgtatgtaatccgtgcgtttgaagggcgtctgacacttgagctgcagttaaccccataacagcggccatttttccgtcagtggccatactcattaattcgcctcttttacggacaagctgcaggccggtaataaaatcaaaagcacctgctgcaaacagcgcattatattctcccaaactgtggccggcaacataatccggctttatgtcattgtcttggatttttttcaaatagcttaacgcgtttacaacatataaagcaggctgggtgaactgcgtcttgtgaaggttggaatacggattctcaagacaaagccgtttcatggaatatccgagtgtttcatcagcctgctccgttaagtctttaaattcatcaaacaatgagctccccattccctgcttttgagaaccttgtccggggaataagtatgtgatcattttctcagccatcctttctcggattcagataagaagcatgttcaagttgatagtaacttcacaaaaataccatgtcaagttaatttatcctatgtgaactcctgaataatgcctatttttccctgtcgaaaggcggactcagggctttcggaacaggcgtaagcagaatgtcccatccggcctgcccggcgttctcttccgcaaactcccgttactcagccattcatcaccagaaatctagtaataacttccattccatttcagaagttccttgcctcaaaagaaaagctagttagatagaactaaattacacattacttaaaatgaaacagccctttttgattttttctgttgcggaaattcacaaaatgttcttttttttcaatctgaaagtaaatattgtttttcaaaagactctccattttttgacccggcttctccccgaaggagtgccccggatacacacgcacatgcggcggaatggaggctttgatcctctgtatactgtgaaacatatcttcagctgagctgcccctgtcctcacatataccgcacccttctgtaaacacggtgtcaccggtaaaaagatgatcagatagcaaatagcacattcccccggccgtatgtcccggggtcagtatacttctgatgataaaccctccggccgcaaaggtttggccgtcttcaagcgctattaagtttctgcaccggaattgatagaaatcgatttccgccgacgacatgtatatatcagaatgatagatttgctgaagcggctccgccaagtttacatggtcataatgcgaatgtgttaataaaatagcggataaatcaacatccaattcatgcagtttatcggttattttatcgatttcccaggacgggtccaccgctatcgcagatttttttgatcggtctgcgataatataacaatagttggaccacatctggtgataagttttgatttgatgcacttcatatgtatgatccattgtcaccattcccatttaaaagatccgggcagactgctgccgccgcccagccgactgtaaccactttaccagatgacaccacgtttttccatggattttccggtaaagttaaaaaaactttctgctcccgccaaaagcaccagtctggaccttttttacaatttgctatgctgatatataaggaaatcagaatattaatttagatgaattctttagggaattttattcagaaaatgaaggatgaatatgagtttcggataaaaagaaaacaaattgagcttttgttttgaaaagcaattgccgaagcggtcgaaggggataatcagtttttagaaatgatccgcaatcaagattattatttcaatccttttcttcaagataaactaaatcatacgggctctcgaaatatatcagaataccttagttcttacaccgaattcaacgttatgttgacattaacataattgaacttagaaaagtaaggcggaatttacactcttttcaaatcagccctagctgcaacaattcacgaaagcgtcgcgcagctttttactgtgcaaaaccaaaactaacataaaatcattaagtgtaaaaagtaaatattaatcattagacaaatagactgtgttatatgggtcggagtttactgctcaaggtaaattgccctgggatgcaaaagcactaagagcagattgggatgcaatacctgctaaagttaaagctgctatgggcggaatcggcgttttgaaataattcttaatacgatcgacaattttactggtgcagttgaagatgcgtgctatgcgggtgctctaaaagaactggcaacccaacagccgcttggcggattactaaaactcttaggcttttcatttaaacggggctattgttggtgtttaacaaatttatcctgtgttaagctttaaagtgattattttctaaagtgctaagatcggaggtaactatggaacataaaagtaatgctgaaccgagcccaaaagctataaaaattctaactttcatcattcctatagttttaataggacttatccttgttcttaagaatattaataccgcagcagcagaaatttcattttatatcgttgctatcggtgtggttctcttagtggttttcagtttgatcaaaaatagaaaaaaccgcaggaagaactaaatgtaagggggggctaattactagtcccccttgactaacttgcggatagtataacctgccaaattccaattttatttaaattccccctccatctcctccctgtgaatttggaaaagcaggtacccatctatataactcagggtagtcacctggttcttcacagataactttaagattttaaggaatcgttttctccattatttcactattaatgcagtgacatatagacggttacaccaaacacaagatgctgcgctgtcaccccaaatactatccataaacaatttttatatgaaagaaaagcagctggatgttaaacaaattattttcatgatttacggcatacagatgcaacaattataccagaaattaaaaaactcaaaagttatctctgacaggctgggtcattcaaactagtaaggctacttgtgggcaaataacggtttagtctcacataaatcattgttcttgcatcacacgcttaaacatcttctccatctcatacgtactgttatttttagttttttgacaataaaccatgattactcaaaacattgatatttcagagcttctaatagttttctgggtaaatatttttattaaattagcatggttagacataaagagagcagcctccttttttgatgataataaatatgatgatgagtggaccgagaatggttacaaaattaaatttaagcgaacccctattataaatatagcggatgtttatatatctaagaaatagtcttaactttttaatttaagggaatgaaagatatgctgactcagaaaggaaatataccgtattatacttaacatgagctaccgatgtaaaaggccagttaaagagaaaaacaggaaaaagcgaaatagatttacgtgcagttgtaaaaagtctcatgcgacaaggagaggttccgtaagacaaaatacaaaattgcatcatctaaaaaagcccaaactctaaaaagttgggcttttaatttaagcggggagaaagcgatttgtagccttaaaataaagtttgattaaatgaacttaataaaccttgataaaagtacaaatagaaaaaacgtgttttgaaaaaaagattgatcaaaacacgttttttctatattcatttcaatcatcgttttataaaaaagtttgatcattttatgtctagaatcttcaacaaacgcgcagtctgaggaatagtaccttataataaaaactgctgagtgctacctagactgaatactccacccatgtgttttaagcttttttatataatcttcaacactaattttttcaacttcaattgctaacggcgtcagtgaaacaaggcactcatttgaagtataatttattgtaacttttaccacctcgtatccattatggaaacctgaatcaaatccaggatcgtcaattatatctcctacttgagggcgaaagtcagattcaaatgttttcactaatgtttgagtattttcctctgtaggttcttgattaattgatgagacaaataatattaaatttatattcaaagcatttcccccctttctatgctgtttaaataatctttagtttaattctattgttattgatgataacaaattttaacttgcatcacaaattaattgtgccattaaatggaccgtttgttgaattctaaaaatctgtattgttaatgtgattctatcaaacttttttataaattatcggactttgttttacataatcaatctttattttaaagctacacgattaagttttttagtcctcccctgtttttcttttatttgattttactactatccccgtaatttgcacaaatggaaaaaccgcaatatgattgcggtctgctgtgaatctgtatttgaagttattcagtccgctcatcagcttgcggctttagtaagatggttaagacaattcctgataatatcaaaacatttctataaaaaaagattcggattatagaatgcttaaagacaattacctggacaaggaacaagtatctgtctttatggaggcagcaaaatcttctaaatatcatcacatgatcgctttaactcttttaaggaccggcttaagaaaaggtgaactcattgctttatattggtccgatattgactttaataacaaaactttaaggattgctaaatctaagaacgagtttggaatcatagcacctaaaacccgtaaaagtgttagaactataagcatcgatgacactttaattaaagagatgaaaaagtttaaggaatggcaagaagaaaataaaataaaacacggtgataattataaccagtctcccttttttattatcaaccataagggagatgaccttggaccgtttggaattgataaagtcatagattccttgctaaagaaaactgatctgcaccacattactccacatggtttgagacacacacacgccattatgctgctagaaagtggtgcagatatcaaatttgcaagtgagagactcggtcatacggatgtgaaaatgacagctgatgtctatatccatatcttgcagaatcacaatcaaaaaagcattaatcagtttgatgaatacctaaacagctaaaatcagtgggcaaaatgtgggcacgagagataaatccctcacagaatccttctacatcacacgcttaaacatcttctccatctcatacgtgctgtgatgaattatgatcggccggccgtgcgggcatgtgaacgggtctgtcgttcggcgcaggtcatccaagagcgctttgatttcgtcgtttcgcaaatggcggttcgctttgattgagcctttgcagctcatcataatggccgcttcctcccgcagttttttaatatcgatctgtttggcgtcaagcacctgctgaatgatttcttcaatcagttcagcttcttccccttttggaaaccaggccggatggcagcggacgatgtagctgttcgtgccgaatgcttctaaaaatactccgacgctttcaagctcatgctgatgctggtcaatgatcagcgcctcatttgccgcataatgaaaggtgagcggcacgatcatatcctgcacttcaggctcgacctgcccaactttctcccggaaatattcgtatttaatccgttcttgtgcagcatgctggtcaatgatatacaagccgttttcgttttgggctaaaatatatgtcccgtgcatttggccgatcggatacatcaccggaactctttcttcccgtatttcttcagagtcagcctcctcttcaggctccggaatatcggaaacatgcgcttccgttaccggcatgccgatcttcggcggcactccgtgacccgcttcatccggcagggactcttcttctattaccggctcaggctcttttacgaccgaactcagcttcatcggtgagtaagacggctccggcgttttttcaggaagtttccgctcaggcgcgctttcctcgaatgtcataaattgctgttcgtttttggccggtgccggcgcggattttttcgggagctgggcgctcggaataagccgctgcttttgaaacacttcctttatcccgtcacggatcagctcatgcagctccgtctctttgctgaggcggacttcaagcttcgagggatggacattgacatcgaccaaaatcgggtccatcgtaatttcgataaacgtaatcggatggcggccgatcggcagtagtgtgtgatagccctcatgcaccgcttttacaagcgggaaattcttaatgtatcttccgttaatgacagatgacatgtagtttctggatgcacgcgtgatttccggaagcgcaatgtagcccttgacttcaaaatcaagcgagctgacatggagcggtatcatttttttcgcaaccgccgtcccgtaaattgcggccagcacatggcgcacgtccccgttaccgtttgtctgcagcagatttttcccctgatggcggagacggatcgatacttccggatgcgcaagagcgatccggttgacaacatccgtaatattgccgagctccgtatgcacggttttcatatatttcaatctggcgggtgtattgaaaaacaggttggtaacgataatctccgttccttttctgctggaggatttctgctcagaaatgatattcccgccctgaagaatgagatgggttcccgctccctcgccgatgctcgttttgatttccagatgagaaacagacgcgatacttggcaaagcttctccgcggaaaccgagtgttctcacccggaacaggtcgttttcatctttgattttactggtcgcgtggcggcggaaagcccgcttgcaatcatcggtttccatcccttcgccgttatcgagcacccgaatcgacgaaagccccgcttcctctatgtcgatttcaatgactgtgctgtttgcgtcgatggcgttttccaccaattctttaacgactgaggcaggccgttcgaccacctcgccggccgctattttattcgagagttcatctgacagctggatgacttttgccaagtccgtcacctctttctattttaattttttttgcagcttgtacatttcattcatcgcctcaagcggcgtcatatcgagaatattgattgacttaaaagcttcaagcacttgtttttctttattagaaacagccggtgccttctgttctttttcaccgtcagcaaaaaaggacagctgtgccggttcttctctgacggcggactttttctcagataccgccggaagctccggtttatctcccgtctgctcaagctgtttcaaaatctcctgcgcgcggctgatcagatcgtccgggagctcggcaagctgggcgacatgaatgccgtaacttttatctgcggctccttctttgatttgatggagaaacacgaccgttccgttatattcctctgcgcgcacatgaacatttttcagctgaggaagcttatcttcaagcaccgtcagctcatgataatgcgtgctgaacagtgttttagcgccgatatgatcatggacatactcaataattgcctgtgccagcgccattccgtcgtacgttgatgtcccgcggccgatttcatcaaacaggatcaggctgtcttttgtggcgttcacaatcgcgtttttcgcttccagcatttccaccataaaggtgctttgtccggaaatcaaatcatccgctgccccgattctcgtgaagatttgatcaaaaatcggcagaaccgcttcttttgcgggcacaaaacagccgatctgagccatgatcgatagaagtgcgatctgtctcatatacgtgcttttacctgacatattcggacccgtaatcaggagcatttcccgcgaatcgcccatcaggcagttgttcgggacgtattcttgactgtccatcaccttttcaacgacggggtgtctcccttcaatgacttttacttcattatcagaaaagacgggctttgtgtaatgcctgttttcactgatcgtagcaaagcattgcagtgcgtccagctcactcatttgtttggcaagacgctgcagacgcggaataaattgtttcaccttttcacgcagtccggcaaaaagctcatattccagctcgcagatgttgttttccgcttctaaaataagcgcttctttttccttcaattccggcgtaatgtaccgttcggcgtttgtgagggtctgcttccgctcataccgtccgtcctcaagcagatgaaggtttgcttttgtgacttcaatataatagccgaacactttattgaaaccgacctttaatgaacggatgcccgtataagcgcgttcctgctgctccagtctggcaatccagtctttaccgtttttgctggcgtcacggtactcatcgagcttctgatgatagccgtctttaattaaattgccttcttttaacgataacggcgggttttcatgaagggcttcttctaacaggtcaagcaaatctccgcacggatcaatcaagccggcgcgttcttttgcttttttatggttaagagaccctacaagctctttgatgctcggcacttgttttaaagattctttcagctggattaaatcccttgcgttgacgtttccgaatgcgacccggcccgccagacgttctaaatcgtatacttccttcaggcgctctcgcagatcttcacgctcaaacagatgattgatcagcgtctcgaccatttcctggcgttcttcgatttgggatgccctgatcagcgggcggtcaatccattgtttgagaagccggccgcccatcgctgttttcgtctcgtctaaaagccaaagcaatgacccttttttgcttttagaacggatcgtttccgtcagctcaagattccgttttgaatacaggtcaattttcatcgcttcttccaattcatatacttgaaccggctgcaggtgatccaggctccgtttttgcgttttctgcaaatacgtatataaacgcataaacgtctctgtcagctcttcgcccggcaagtgctttgcgatttcaatgcgttctgttatttccccgtcttcgatggaaatcgtggcgccgcaccgttctttcagctgagcagctgtatgttcgttaaacttgctcgatacgacaatttcctttgcgccgactgagtaaatttctgacatgacatcttcaatccgctcaataaatacggccaggttttctccggtcgttaagtccgataaagcgagaccgtatccgtcacgaaattcggaaacggaagcgataaagttgttttccgactcgtggatgccttttccatccatcacggttcccggtgtgatcagctggacgacttctctttttacaacgcctttagccgccttcggatcttccgtctgttcacagatcgccactttatagccctttttaatcagctgttcaatataagccgccgcggaatgataaggcacgccgcacatcggaattttatcagccgaacctccgtctctgcttgtcagtgtaatttcaagctcttgtgacgctttttttgcatcttcaaaaaacatttcataaaagtcaccaagccgaaaaaataaaaaggcatcttggtgctctgcctttatcttcaagtattgctgtatcataggcgtgtaactagccatcatttaatccctcactatgtatcttctcttatccgaatcccattataacataaacaaaagagtgatatctttatatataaaaaagagacttggggtgttaaactcccctagcctcaacttattcttcaggatctccgactaaaaattcagggttaatgtcctctaattcttcatcaagatcgtcttcccaatcatcatcatcgtcttcttcccagtcaggattgacttcgacgacgactttcgtttcaccgaccacttctgctaaaaattctctctctgcctgaaccacgattttatttccgttaggagaaatggtgacttcaagacaattcggctgctgcagcactttggcaatgacttcgtgttcgtcatctaagtaatttgtgtctctgtatctgagtttaatcacatcgacatactttactctctcggttacaacttccgtttttgtattatcggcgtaagagtaccagacgtttatatcataatacccttcaatttctacagtcttcccgatcttttcggcatcgtacttgtggttgataatccagccgcccaatatacttgacggtttttctccaggtgagatcgtgttggtgcattgggtgaattttcttcctttcgcaactaccgctttcgtaataatttccctgtattcagacattccggcaggcctccttgttcttcttcgtgttatcttatgctgggcatttgtctcatgtgcatttttataataaaaatataaaaatacaaagtttctgtttcattgtatgcagccctgcccagaaactttacttttaagtatgataaaactttccagtaaaatgggacaaaacggtgagtcaatgaaaatttagtacatattacaattagttctcaaacagcaaaaaaacacgggccgatgaaggccccgtgtttaaatagaacagctgttattcgaatgttttacttttgaaccggtttctcccgtcagcaggttgcctccggtagatgtaatgatttcgtttgtcacctgatttgagatcgtatgtgcgacaagctgaagaaggtcattgacctcaatctgggaatctctgaattcttgaatgatcggaatcccttcaagttcttcctgcagggcgtcaattttactttccacttgtttcagcgcttcaagcttttcgtagtgcttcaggttaacggcttgcttttgcagagttttaatctgattaataatcgcggagactttttcattttcgttaatctgcgcctcggcgcgtttgaaaaaatcaacttcttctgtttcagaaatcattttcgcaaggttcctagcctgctgtacaatgtctttctttgagtaaagcgtcattattatttcacctcgattgcttctcctgccatcacaccgtcaagcgaccatgttttcgcctgttcgattttgacgcgtacaatcttgccgatggcgtctttcggccctttgaagttgacgagcttgcttttttccgtatagccggcaagaatgtcagggttatttttgctttctccctcaactaatacttcgacagtcctgccttcatattccttcatttttttggctgaaatttctttcaccaaatcattgaggcgctgaagacgttctttcttgaccctcatcggaacattgtctttcatcttcgctgccggcgtgccttcacgaggagagtaaataaacgtatatgcgctgtcaaattccacttcgcgatataacgaaagcgtttcttcaaattgttcatcggtttcattcggaaaaccgacaataatatcggtcgtcagtgaagcgttcggcatcgccgctttaatttttccgacaagctccagatagcgttctctgtcatatttgcgcgccatcatttttaacatcgctgagcttcctgattgaaccggaagatggatatggtcaagaaggttgccgcctttggcgagcacttcgatcagatgatcatcaaagtcacgcggatgactcgtcgtgaatcggattctcggaatatcaattttacgcagttcgtccattaaatcaccgagtccgtacgtcatatcctcaaaatcttttccgtacgcattcacgttttgaccgagcagtgtgatttctttatagccttcgcttgcaagtcttctgacttcctggataatttcctcaggacggcggcttcgttcttttccgcgggtatacggtacgatgcagtatgtgcagaacttgtcacagccgtacataatgttgacccagcctttaatttttccgttgcggactttcggaaggttttcaatgacatccccttccttcgaccacacttcaatgaccatctcttttgataaatatgcctctgataacagttccggcagacggtgaatgttgtgcgtgccgaaaatcatatcgacaaacgggtgcttcttaaggatgcggtttacgactgattcttcctgtgacatgcagccgcagacgccgagaatcaagtccgggttattttttttgagcgcctttaaatggccgagctcgccgaacactttgttttcagcattttcccggatagcgcaagtgtttaataaaataacgttcgcgtcatcaaccgaatttgtcgcttcataaccgagcgccataaaaatacccgccatgacttccgtatcatgctcgttcatttggcatccgtacgtgcggatataaaatttcctgccttcaccgaggcctttaaattcttctgagattttaaaatcgttatgatattgaacggattctttgccccgttttttcgcatcttttaaagaaggcggaatatatacggcttcaaaatacttgctgtaatccttttcggattttttgtccgccggattcacttgtccgctttcctgcttttgcttttcattcatgttcgaatgtctcctttcaaccgaaacttccaccctcaagtatactggttaaaagcgtttgacacaaccgccagcctattattgtacaccttattgagaataagaatcaataagaaataaaaaagagggaatcatttcccccttacacaagctgcagctcttttgcggctgaacggattacttccagggcccggtcaagctcctcttttgtatgctccgccgtaataatggtgcggattctcgcttttccttgggcgaccgtcggatacacgatgctttgtgcaaagacgccgcgggtcaataaaaggtctgataatgcctgggctttttcttcctcccctattaatatcggcacgatcggtgtttcgctttttgtgagggtcagccccatttgaaccagtttgtctttgaaatacgccgtgttctcccatagcttttccatatgctccggctcttccagcaggacgtcaatggcttctatgcatgcggccgttaccgcaggcggatgagaagtgctgaataagaaaggacgccctttatggcgcaggtaatcgatcagaacctgcgaccctgcggcataaccgccaagcactccgatggctttgcttaatgtgcccacctgtatgtggactcttccgtcaagcccgaagtgattaaccgttccccttccgttttttccgagtacgccggaagcatgcgcgtcgtcgaccatcacaaaggcatcgtacgcctctgcaagtttgacgatgtcaggcaaaggagcgatgttgccgtccattgagaatacgccgtcggtgacgatcaggcgcatgcggtaattcattgattttttcagcaccctttccaaatcgtccatatcaacatggcggtacacctttttatctgctttcgtcagcctgatcccgtcaatgatggaagcatggttcagttcgtcagagatcacgatatcttcttttgtaagaatgcttgataagacgccctgattcgttgtgaaccccgattgaaaaacaagtgccgcttctgtttttttaaagtttgccaattttttctccagctcattgtgcattgtgaatgttccggcgattgtccggacggaccccgtacccgctccgaattcttccgcggcgcgtttggccgcttcgacaagccttggatgcgacgtcaaaccgagataattgttcgatgaaagctgtatcacgttttcccctttgacttgcaccgacggaccctgcttcgtttcaatttgtttcatttgctgccacgttttattttctttcattttatcaagctctgcttttagaaattcaaattctttcattatagaaccctccccttatggaatcaaaatgactttgccgcactggccctttctcatcaggtcaaaccctttttcaaagtcttcaagcggaaactgatgcgtgatcaccggcgtcagatcaacaaggccggattcaagcaggtgcgatacctgccgccatgtttcaaacatttttctgcctgtgatgccttggacggtaagtcctttaaacaccacgtcatttgtcaggtcaaccgtcaccggacgttccggcagactcagcatgtggaaccttcccccgttggccgccatctttaatccttgtgctatagctgccgggtggcctgacatttcgcagacaaggtcgatcccttctccgcctgttaaggtgtcgatcacctcaagcggatcttccttatcagctgaaatggtgatcgtggctcccaatttcttcgcaagagccagcctgtaatcatttttatcaatggccgcaatacaggatgcaccggccgctttagccactgccaccgccatcagcccgatcggtccgcagccgataattgcagcggaaccgcccgcaagctggctgctttccagcaccgtatgcaccgcgttgccaagcggctcttgaacagaagcgacggcggggtccatatcagcgggatttttccaaacatttcgagccggcactttgacatattcagcgaaggaaccggctgtatctacgccgaggatctttgtatgggtgcacacatgatgttttcctgttaaacaagggacacaagtaccgcagacgaagtgggtttcagccgaaacgtagtcacctattttgacatttgtgacgtgcttgcccgtttccgctacgataccgctgaattcatgtccgaatacttgaggtgttttgattcgtttctgagcccattgatcccaattataaatatgcacatctgtaccgcatatagatgcggcctgtactttaatgagaacttcattctcattaatggaaggtatgggaatttctttcagagttgctccgaaagcgttttcatttttgacgatagctttcatctttcctcccaacatgtacactcctcctcgaaaaaacactgtaataactggattgtaacatgagataaaaaggaggtaaataccagtgtccactccatgaaaacaactgcttccgtccggaaaaatgggcgggattttttttgaatattatatgaataaagccatttatcatctcttcgtactattaatataatattgtgagaaaatatgacaacaataaaaacaacccgctcgccttacgcaagcaggttgagaatatcatgtttttgtttttaacggggttcgacgattaacttaatcgccgttctttcttctccgtcaatctgtatatctgtaaaagccggaatacaaatcaaatctacgccgcttggcgcgacaaagcctctggcaatcgcaaccgctttaacagcctggtttaaggcacccgccccaattgcttgaatttcggcggctccgcgttccctcaatacaccggcaagcgcgcctgctactgaatttggacttgattttgctgaaacttttaagatttccatttctgctcccccttagttttacaatggataagtgagtgttcattagaacaatcattattagatgttgctatccaaaaagccatccccacaatgcttttcaaaaatagcgggctaccttccatttctactatattcactaagaagttgctatattcctgcttttccttttaatatttttataaaataaacacatgatcacctattcaaagaacatatggtcatcattgattaatatccgttcgatatttacggcctttttcgtttgatcgtcgatgtcaatgagcactccgctcagtgtagttttaccttccgccaccgtaaaccggacgggaagattggttttaaaccgcttgatgaccgtttctctgtccataccgagaattccgtcgtacggacccgtcatgcctacatcagtaatatatgccgttcctttcggcaaaatgcggttatctgccgtttgcacgtgtgtatgggtgcctaccacggcagaggctcttccgtctgtgtaccagccgatcgcaattttttcgcttgtcgcttcggcgtgaaaatcaataaaaatgtacggcgtgcgctttttcgcttcttctattaattcatccgctttagcaaacggatcatcaagcggcggaagaaacgtccgcccctgtaaattaatgacggcaagctcttttccgttcgatttaatataagtaatgcctttgcccggcgtaccttccgggaaattcgccggccggacaagatgcggcacatcatcaataaagtcgaagatctctcttttatcccacgtatggtttcccattgtaatggcatctgctcccgcttccatcaggctgtggtagatcttttctgtcagtccttttccatgtgctgcattttctccgttaataattgtaaaatgcggtttatgtttcgctttcagtttcgggacatattcttttaccatgtcgcggcccggggaaccgacaacatctccgataaataaaattctcatacattccattccttccttttcagggactcaaaaaaataaagtgatgcgctaagcatcactttattttgcatactctacggctcgagtttctctgattacggtcactttaatgtggcccggataatcaagctcgtcctcaattcgtttacggatatcacgtgccaaacgatgggcttctaaatcattaatggagtccggcttcaccatgatgcgaacttcacggccggcctgaatcgcaaatgatttttcaacaccttcgtaagactcggagatttcttcaagcttttcaagtctgcggatatagttttcgagcgtttcacttctcgcacccggtcttgcggctgacagtgcatcagcggcagcaaccagaacggcgataatggaagtcggctcttcgtctccgtggtgtgacgcaatactgttaatgacgactggatgctctttatatttggtcgcaagctccactccgatttccacgtggcttccttccacttcatggtcaattgcttttccgatgtcatgcagaagaccggcccgcttggcaagctttgcatcttctccaagctcggaagccattaaacctgctaaaaacgcaacttccatagaatgtttcagtacgttctgcccgtagcttgtacggaatttcaaccggccgaggatcttgatcagatccgggtggaggccgtgaacgccgacttcaaacgtcgtctgctcacccatttcccggatatagtcatctacctcacggcgggatttttcaaccatttcttcaatgcgcgccgggtgaatacggccatcctgaacgagtttatcaagagcgattcttgccgtctcccgtctgatcggatcaaatccggaaagaatgactgcttcaggtgtgtcatcaataatcaggtcaatacctgtaagcgtttcaagcgtacgaatgttacgcccttcacggccgatgatacgtcctttcatctcatcattcggaagattgacgaccgataccgtcgtttcggcaacatgatctgctgcacagcgctgcaaagcaagcgacagaatgtttttcgcctttttatctgcctcttctttcgcacggttttcggtttcttttgtcatgatggcgatgtcatgtgaaagctcattttcaacccggtcaagaatgatttgtttcgcttcatcccgtgtcaggctcgaaatgcgttcgagttctgactgctgcatacgaatcatctcatccactttgctttccatctcttcaatatgttgttgtcgttcattcagagaatgatctttcttctccaacatcgcttcccgtttatcaattccttcatgtttacggtcaagattttcttctttttgaagtaaacggttttcttgtttttgaagctcatttcgtctttcacgaacttcctgttcagcatctattcgaagtgtatggatttcgtcctttgcttcaagcagagcttcttttttcagtgcttcagcatcacgctttgcatcttcaaggatttgctcggcagcaccgcgtgcgcccgcaatctttgcttcggcaatggttttacgaacatagtagccaacaactaaaccgagcagagtcagcaaaatggagatgagaaccgtcattggggtcatactttcacctcctcttgctatgaacttggtttttgcttaaataagtgccggcatgtacattgtctgattttctcaacatacagaaccttcacagggaatgagtctctcacgcccttgtcaagtttaaatggtttaacaatcatgttaaaaaaacaaatgttacaacttcattgtaattgtgtcggaaatacttgtcaagcttgccagcttaacgattcgccttcagctcggatcttcgcccatgtatatatcataccatacctagatccgcttttcgtgaatgacggctctgttagtccggctggttaagcaattggtaaattctattgtttacctgtcctaatttggcgttattctgaatgtttgacagtaatatgacatatttgcttgccgaatggctgaagctgttcaaaatgttgtaaccgggcataacaccgtgattggaatagcttcccggatcaatgtaaaaccccatgccgtaagcggcactgcttcctgctgtaaacatttttgtgaagctttcttttgaaaggagcgtgccgtttacgatcgctttatcaaatttatagagatcttcagcgctcatatacatgtcgcccgccccgtacagctgcgataagtccaaaaggtgcggcgttacaagactgccgctctcatcgactttgtagccgacggcaggatatttggctttggcaaatgttttgtaaaatccggcatgcttcattccggccggtttgaacacgtgttcttttatatattgttcataagactccccgctgacttgagatacgatataagcaagcactgaatagttggaatccctgtaatcccaaaccccgggctgccgtttaattccgcggtattctatatccttgattaaatcaattggagaaatcggtccctgtccctcaatatgcccgtttatgccggacgtatgattgagcaggtttttcaatgtaatgcgcgtgccgttaggaaaattcggcaagtatgtactgacggggtcactcgtctgcagcagccctttttcttcaagctgcaggacagccgtcgcgattaacgctttttgtgaagaaccgatataatatgatgtctccggattgtttttaattttttgttttcggtccgcatagccaaagccttttttcagcacaacttttccatcttttacgatcattgctgtgccgctgaacccgatctgttgcaagtaattgctgatctgtttattgtgatcgattgatttaggtgttttctctttttgcgtcttttcttttttctgttgagtctggtcttttgaagtatcagattgagcggcgggagcgtttttaacggattccttctcccggtgatgcgctgtgacggtccagatcataataaaaacagtgacaagcagcagaaaaagaaacagccctcccgttttcatcagcttcttctttctttttttatttattcttgtgcggcgggggctcgtcatcttttttcctcctcagatataatttcaactttcgccatgatgttagacgagtaaagggtgaaaaaagttgtaacattccagataaaattttccgaaacagccagtgtttttttgaaacacacaaaaaaagagcggaaattgcttattccgctcttttgatcgtgtttttattcttctaattccatctcttcctgaacttcttccgctttgtccgttacaccgttattgtctaaaccgtaatattcacggatttgttcctgaatcatcagcatgatgtctttattttcttttaagaactgcttggcgttttcacggccctgaccgagacgttcttcttcataagaataccacgaaccgcttttttgcacgatatccagttcagttccaaggtcgatgatttccccttctttggagattccttcaccgtacataatgtccacttcagccgtacggaacggaggagcgactttgttttttacgactttaattctcgttttattccccatcacgtcgttgccctgctttaattgctcggcacggcgcacttcaaggcgcacggaagaatagaatttcagcgcacggccgcccggtgtcgtctccggatttccgaacataacgccgactttttcacgaatctggttaataaagattgcgattgttttagatttattgatggcgccggaaagctttcggagcgcctgagacatgagacgcgcctgtaaaccgacgtgtgaatcacccatgtcaccttcaatttcagcttttggaacaagcgccgcaacagagtcaacgactacgatatcaacagctccgcttcgcaccagcgcttcagcaatctctagcgcctgctctcccgtatccggctgagaaagcagaagctcttcgatattgacaccgagcttttgcgcgtaaacaggatcaagagcatgctcagcatcaataaatgctgcctgtccgcctttttcctgaacctcagcgattgcgtgaagcgctacagtcgttttacctgagctttcaggtccgtatacttcaataatccgtccgcgcgggtatccgcctattccgagagcggtatcaagtgcaagggaaccgcttggcaccgttgaaattcttgtatccgttttttctccgagcttcatgatggaacctttgccgaattgtttttctatttgcttaagagccatatctaaggctgcctgacgatcactcatttattttttcctcctttatcttgccactacatatactataccttgtttactggcatttgccaagaaaaaagcgaacgcatattcggattttttccgcgttcgcttttctgcaaaagagcataatttcccttataaaacttaaaaatcagagaaaacggctctttaaaactttatttttgatccagcatttttaaaatgagatggcagccgtatttagcggcgcgctttctgatcccggttcttgagccggcaaagttaaattcgtgcacctcttcttttccttccgctgaaatgccgataaagacgcggcccggcgcatgcccttcctgcgggtcgggacccgcaaccccggtaaagctgatgccgatatcgcttccggtcagctttctcacaccggctgcaagctctttcgcacactctttgctgaccgctccgctttctgcgagcgtctcagctttcacgccgagcacatgctgtttcacgctgtcggaatagcagacaacgccccctgcaaatagttgagacgcaccgcttaaatcagtcacccactctgaaaacaggccgcctgtaaagctttcggcagaagaaatcgtaattccgttttgtctgcatgcttttgaaagctccttcaccagagacgtatcatcatatccgtagaaaaattcaccgacacgttctaaaatggcggcttccgtttcttttaaaagccgttctgtttctttttcgtcggcatgtttcgccgttaaacgcagcgtgacctctccgtcagcagcgagcggggcaatcgtcgggttcgtctgcgcatcaatgatatcttctaaatcagcttcaagctgggattcaccgattccgaaaaaccgcagcacggttgaaacgattttctcattagaaccgagctttttaagaagcagcggcttcgcttcattttcaaacatcggacgcagctcgctcggcggcccgggaagcagcatataaagccttgagccgtgctctgcaagcattcccggcgccatgccgaaatgattcgccaaaacgtctgagccctcaatgacgagcgcctgtttgcggttattcggcgacatggtccgttttgttttcgcgaaatattcttcgatcgaccggaacgcttcgtcattcagaacgagcgggcgccccagtgtgtttgcaatggtttctttcgtcaaatcgtccttggtcggtccgaggccgcctgaaaaaataatcaggtctgagcgctcttcggcaatgcggatgacttgcttaagccgctccggattgtcaccgacagcggtatgataaaacacgtttacaccgatttccgccagctctttactgataaactgcgcgttcgtattggcgatctggccgagcagaagctccgagccgactgcaatgatttctgctttttttgctatttccatctttaagtccttctttcttagttagatgtttttaacgcatcccagttcttcgcaaaataatcccagccggaaatgactgtgaagagcacggccacccataaagcgatatcgccgaacgggaaagaaacgagctcaaacggaagattatgcagcaaaagcgcggcaacagcgatgatctgagcccatgttttaattttccccagcatattggcggctacaacttcccccgttcccgccagcacaagtcttaatcccgttacggcaaattcgcggctgatgatgatgatgaccatccacgccggcgcaaggtcaaactgcacaagcgtaattaatgccgcggacaccagcagtttgtcagccagcggatctaaaaatttcccgaaatttgtcacgaggttcagttttctggcgtagtagccatccacccagtcagtcgttgatgcgataatgaacaaaacagctcccgtaagatgcgcgaccggaatcgattcatcccctatatgaacgctgccccactgaaaaggaacaagcatgataatcataaatacaggaattaaagcgattcttgccagtgtgattttattcggtaagttaaacataaagcccctccaatatatgtactcggacgtgaagaaaaagtcatcttaatcgttcagatgacttttccccttttattttttcatcttgattgtgatggtctgcgccatcacatcatgcggattgagttcataggacagaacctctccgttgattttaattttcaggttaggggcatagcccgtgcggatttcaatctgcttttgatccgtgacgtcttttttaaaggtttcgcctttttgcagcgttccttcttttaaagaaccgccgctgtcatcacggacgcggatccatgcgctgtcagaagcaatcagttcaagcttatacttatctgccccggagacgttgtatgaagaagccgagccttccgttccggccgctttgatctccgtcttttcactgcttttttctttcttctgctctgacgcttttgtgtcctttttgtcttttttgctgtcagattgcgcttcgtcatttgtattgccgtcgtttttcagcgcagaatccttaggaatctcatacttgctctcactttgggtgactgccttatctccatctgtctgcccggatttgctcattccgagctgaataatcgcataaatgatcgcgatgacgataatgacaccgatgacgacaaggacggtcggaagccattccgccgcctttgaagcggacttaggaagctccctttgcatggcgagaccggagattttttccgacacatcgtcatggtacgtgttagggatgtcttttttatattcttcaaataactgatctgaatcaagcccgacagcttcagcgtattgcttgataaacgcccgcacataaaaattgccgggaatgacgtcataattgccttcttccagagcggttaagtatcttttctgaattttcgtcgccgcctggagttcatccaatgacatccctttttcctctctggcttctttaagccggattgctaattctgtcacaacaaacaccttccaatattaaaagtcaaagcttgaaaaaccggtctgatcaaatatttgcggttcttctgcatgttcatatgtaataacttcgtcaggatcatttctgagttcgataatataatcgaaatcatcgagcgtatactccgaattttgaacaaaaatatcggggtgctccacgacctttgtcgccggaagccgcataatttcactgacgagctgaagatggcgctcagatccccgtcttgtcgaaacgatgccgtcgaggataaacacgttttccgtgctgtattcatcggcaaccagctggctccggatcgtttgttttagcagcgttgatgatacgaaaagccatcttttgctggcacaaacgcttgacgcaacgatggactccgtttttccgaccctcggcattccccggattccgatcagtttgtgtccttcttttttaaacagctcggccataaagtcaaccagaagaccgagctcgtccctttcaaaacggaaggtttttttgtcatcggcatcacgctgaatgtatcttccgtggcggactgcgagacggtcgcgaagcctcggttctctcagcttcgttactttaatggtctccattgtttttaaaattgattccaatcgtttaatttgatctatatgccggcatctgagcagcattccccttctggaaaggtcgacaccgttaattgtgacaatattaattgacagcatcccgagaagagatgaaatatccccgagcaggccggggcggttcacttgaatttcatattcaaaataccattcgagctttgccaaatgatataccccctccattgtggcaaatttttaccttcctttatcataaaacatttttctctaattagaaagaagaatgttgctctatagaggaaaacataaaaaaagagaggagaaatcccccctcttaatgagtgctgttattttcaacaagcttcaccatcatatttgcgatggcgcgctgttcatcttcagaagcaacgctccaaagatcagcaagcactttttcctgatggtttttcgagtcgacttcgttcgcaaggtaaccgccgatttctgtagcgaggtcagtgatcgtttcatcactcatccctttttcctgcgcatagttcaatctgtcgccaaggaaattcttccaattatcccagttttctaatactgacatgttgggttcctccatttcatctgttgttacaaaattattttgtccgtacagatgcaaactatacacacatttttttcagcagtgccagccgccgtttacggataatatatgccccgtaatataggaagccttgtccgataataaaaaggccgccgcttcggcgatttcctccggctttgccagccggcccgcgggaatttcctctgccaacgcttctttttcatcagacgtgaactgatcaagcatatttgtatcaacggcacccggcgagactgcattcacgcggacgccgctcggagcaagctctttggcaagcgctttgacgaacgaatgctgcgctcccttgaccatgctgtataatacctcgcacgatgcgcctgtttctccccagacggaaccgatcgcgacgatgcccccgctttttttccggatcatgccgggcatcagattacgcgccaaaagaaacggactcgttacatgcagctgcaccatctcccgcgccgtgtcatccgtaacgtccgtaatcaggccgaaatgacttttgccgctgtttaataccagagcatccacaggctgcttaacggaacggctgagtgtctccgcgccatccggtgaggacaaatccgcctgaataacggaggcttttacgccgaatgatgcgctcagcctttccgcaagcctgtgtgcggcttccttattagaatgataatgcaagaggacgtcatatccgttttttgcgaggacttcacttatactttgtccgattccgccgcttgctccggttacgagcgctgtctgtttcatcaatcaatactccttctttccccagaaaaacatccctcagggcgtgagggatgtttttgttatgattttggcacgactttgcagactgtcagcctgtcttctgatatttcttcttcaatgacccgctttacgtcatccagcgtaatctgctccagtacggttacgacatcaaacagactcatatctaaaaaggcgtagcgtgtgaattggttggcgatatattcaggcgaattgagcgcttttaagaatgacccgatcttcttttttctcgcaagatcaagtttttccgcagtcacggctgattccgcatcaagcagcatgtgttttaattcgtcagcgagcttatccggctccggtgtatctcctccgacagaggcaaaaccgaatccgtattcagccgtgtaatcgaagctgaaggtctcatcaatgtagcctttgtcgtacaagtcaccgtaatgcggtgagctttttccgaagagacattcaagcatgaggttcatgctgagctcgtgctttaacagcccccgccccgttttataagggtctttcgcctttaaaccgacaagacattttgagccttgcacgttcatttttaattcctgctcccggcggaaaaccgcttcctgctcctgaacttcttcacgtttgatttcgggctggtctgtaaacggctttttctcctggtttttccgcacctggctgatgaccgcttcaggatctacgggaccgacgataaagagcagcatattgctcgggtgataaaacgtttcgtagcactcatacagcagatctttcgtaatacgagagatgctctccaccgttccggcaatgtcaattttcacggggtggtctttatacatattttcgataaggccgaaaaacagccgccaatccggattatcatcatacatattgatttcctggccgatgatgcctttttctttttcaactgatttttccgtaaaatacgggtcctgaacaaagtctacgagtgtttccaggtttttctccacattagaagtactggagaacagataagcggttcgtgtaaatgatgtaaaggcatttgccgacgccccctgcttactaaagtcctgaaacacgtcgccgtccgctttttcaaacagtttatgctccagaaaatgcgcgattccgtcagggacgtgtaccatttcttccttatttaaaggaacgaattgattgtcaatggaaccgtactttgtcgtaaacacggcgtatgttttattaaagccctgtttcggcagcacatagacatcaaggccgtttgccattttttcatgatacagcgtttcctgaagctgttcgaagtttatcggtttagtcaagatgctccccccgtcccttttaagaaataagtcgtatccagcttaatgttctttccgacattgataatgtcctcttttgtcactttctcgatattgtcaaggaatctttcgatcggtatctctacttgggctgaggcctgctgatacagaaattccgctaagccgtatgccgtatcaatggtttctaatacttgatttttaataacggctttcgtttgggcgatatcatcttctgaaaagtcaccgttttgcatagcctgaaactgttcttcaatgatggtgacggcctgcttgtaatttttcacctcaatgcccgacatgaccatcaaaagccctttgaaactttccacccttgaggctgcataataggcgaggctagctttttcacggacatttataaacagctttgaatgagagaaacccccgaacagcccgttaaacacctgcaatgccggataatccggatctgtatatgtcgtattggtccggaatccgatattcagcttgccctgcttgacgtcctcttcatcaatgacttccttcggatcgggctgttcattcgccgcgcttctttcaaaaggctgcagctcccgttcttccgttttaaaatacgtatcaacggccgttttcacctgatctgtatcaacatcgccgatgacgtacaggtccagctgatcttcgcgtatggctttttgataggcttcatacaaatcttgcggtgtaatgtgttcaacatcatcgaactcgccgttgacgtgaagggcatacggttcgcttttgcacatttcctgaacgagacgcagattagaatatctcatcttatcatcatatacggcttgaatccgctgtttcagcgtccgtttttcctgcgtgacataaaggggcaggaaggcgccgttttccaaagcgggcgaaaagacaagctctgataaaagctgaaggcctttttccaataacggtgtgcggtccttcagatacttttcattaggaatctcaagcctgaacgtaatgacatgacgttctcccttttttgtcagatcagctgaaacggatgtgccgtacagctcatcaaaataagaccgcagatcagcggttttcgggcggctttctgttccgcgcagaagcacatgcggaaacagcgctctttttgttacgagctctttcgttaaaggagccagcattttaaacgtcagcgaaacggttttaaatttctcggtctttacgatgtgggcggtgatcccgccgtgctttgacttcatttcatttacgtaagtcatgtgaaacctccttcgttcattctttcatagtatgtattatgaccaaatttcagcattcgcaaaaaagagtgcgcagatgtaattatatcaactggaggatttataaggaaacaaaaaaacctctgcccgaaaacaggcagaggcattgagcgttattttttcaaattgaaaggccaccagttggctcttccgaatattttcaccatgaccggtacaaaaaacggaaggacgacaattgcgtacatgagaaggcctgttaataccacggttgcaatctgtaataaggaaagaacgcctgacggcagcatggccgcaaaggttcccgctaaaataatggctgcagaaatgatgacggaacccatatttttcatactgctgatcattgcgggttccgttccttcttttttaagctcattaaagcggtccattaaaaagatggaataatccacgcctagagccatcaaaatgacaaagccgaagaacggcacggcccagtttacgcccggatacccgaagaagtgtgtaaagatgtattccgtcacgccgatggatgcgaaatacgtcagtacgagcgacgccactaaataaacaggcataatgagggagcgcagcatcacgatgagaatcagaaaaattcccgccagcataaacatggccgtccgtttgaagtctgaagccgatacttccttcagatcggcattcatgctggagactcccgaaacgccgaaggaagcattcttcagatccgtgttcggaatggccctttttacgctcgctttgatcgcttgaatatcttgaatggccgtatttgagtaaggattgtgatcaagaacgacggtcaattctgtcgtttttctgtcatctgacatgtacgtattaaacacgcttgtgaaatcactgtttgtcaacgcgtctttcggcacaaaccagcctgtcatttctttgtctgacgccttgtgaagctcacccaggtaatcattcgcccccatcatgccgcttgatactttcttaagcccttttacactgtcgttaaggccggaagaaagttcgctgagccgggaagaaaaatcaccaagaccgctcttcatttttttctggccctcggcgagctgtcctgccgccgattcaaggcgcggcatttgtcccgcgagagccccctgtccgtctgacacttgctgcagaccgttttcaatactggtcagaccattgatcattgcgttaatttgagtgtcaatcttcttctgagcggctgccagtcgggcaaattgtttttccgcttgctgcagatgagccttttgactgtcgacctgtttagaaaaagcttctgcatccgcgtttgccttggaaacggctgactgtacacccgtaaaggccgatttgatttcttggtaagagggatcggttttgactgacggtattgacgcttccaattttgcaaacggcagccgggcaagctgcttgttcaaatcggcaagctgtctgctggcttcatctttcatcggcaggacggtttttaccaattttaaagcgttttgcgtttctgaagcgagaccgctgttttgtttgagctgtgaagtcagcatttgtttttgctcttcaatccgctttctcatctgggcgacgccggctttattctcgttcacgccagcctgcagtttattcaggttttctcctatatcagaaagcccggatttcagagacaatgttccgtcaataagctgattgacgcttttgcccgactcttcgatctgcggctgtgaatcagctaacgactttgcggcatgccctaatccgtccgtgattttttcaagtcctgtattgcctttatcaagcccttcttgaagctgctttgcctgatttgtgacaaataattgattcaatccgtttccagcggggcgcgtggcgcttctgaccgtttttacaccctctgttttttcaagttctctgctgattttttcgatatcaatcaggtgtttttcggtatttaatgtctcatcatttttgatgacgactgtggccggaagaagttctcccgggccgaatgcgtctgaaatcgtattaaacgcgcggacggattcatatttatccccgatttcgtcaagactgttgtaagacagcgaccctttgtaaagaaggataggcgggacggtgaataccgcaacgattgcaagactgatgagcggccttttaaatgaaaaccgccctgacgtttcccatgctttgctttgaggatgggaaatatcgcccttaacaggccaaaacaggctttttcctaaaacagccataaaaaacggcacgatcgtcatgagcgcaagcagcagcaccgcgacaccgaccgcaacggccgctgccgactgatacagcttaaatgtcgcaaatccgatgcaggcaaatccgatcagcaccgcaccgccgctgtacaaaaccgtctttccggccgttttgtaggtgacgacgatcgcttctcttatatcagcgccatgcgacagttcttctttaaatctgctgagaagcagaatgcagtagtctgtgccgatcccgaacataatcgcaaccataaaaatctgcgtaaaagttgagagcggaaaattcagctgatcgactaaaaatgcgacaatcgactggctgactaaataagatatcaatactgataaaagcggcacaaacggagcgaccactgaccgaaatacaaggatcagcacgatcaggataaaagcgaccgttatatattcagtctttttcaagccgtcctgtgagctttttaacacatcttcgtcgatcagcgattggcctgtaatgccgtatgatacgccgtacggtttcagctctttatcaattttattttttatttcgatgatatcgtttttggatgtatcaagctgcagctgaacgagcatcgtttttctgtcttttgagagcagctgttttttaatgtcgtcatttttctccccgaagtatgaagtcaccgttttaatctgaagcgcttttttatgttcagacaaagtgctgatggcttcttccagacgattttttttgtctgtcattaagcctttttcatgaaatacgatgacggcagaagaagacggtgcatcggaatcagacatttcatcaagcaattcatgggcgtaagaagaggaatatccgtccggtacggaaatctgccctttctcccgtgtcaattcagccatatcaggcgctgtaagcataaatatcaccgttgcggcgacccacaccgcggcgatgatccagcgggctcggataatgtttttcattatgtctgctgatcctcctcagtcatcatcaatcgatataatttttcatatgtattcacgaacatctccgcctcgtcttcatcaaaatacataatatatgatcggacgagttcctcaatccgccgctccacacggtgaaatacttccgtccccttttccgtgacatttaaaagtatgctccggcggtcgctttggctgcgttctctattgatgtagcctttttcatacaggcggttcgtcatagatgtaatggcgcttttattgacgtggcacaccgcggccagttcaattgatttgcaatcgggattgagcataatatagcggaggatgtaatattgatccaatgtcagttctttgttcactttttcagcgataatgctgtcaattttttttaagacgtgcaggtatacatcggaataacgctgaatcagctgctttactttttcttcatgcaccttttccccctccttccgatagttaatatgtttaactattaaaaaggataacgacttgacggtatcatgtcaatcttcaaaataaaataaagaaagacagtgcagattacaccgtctttaatgattcctttttttcttttgcttgtgatgagatatttaacagcgctaaaaatacagacacaatgccgcaaaaagcggataaaataaaaatcagccagcctgcatttgacatcagggcagcaaagatcggcggtcccgccgctactccgataaaccgcatgctgttataaaatgaggtaatggttcccgattcctcgttgtctacgccttctgtgatgacagcgtctaaagccggcaatgccattccgataccgataccgctgacacacaaaaagataaataataaataaaaactgtgattccaccataggccgataaacgacagtgtcacggcactcattccgaaaacgatgcaaaacttcattttgccttggtcttttccgattttcctgcctgctatatatgaactgacggatagaaataaaagcgggattgccaaaagcgctcctttagccacaccgtcaatgccgtatttcttctccagtgagtctgataaataaaaaagaaccccgaacagcaaaaacataatcacgcagccgatgataaaaaccgtaaagagccagcgtccgtcacgcttaaatatgcggccgacatttttcacaaattcggaaatagaaggcgcttctttttgttcctccggctttgccaccaaaaacaatacgagaaaaaaactgatgagcgaaaaaaacggaatgaaccaaaatggcataaaccaaaaccatgcagccaagagcgaaccgagaatcgggcttattactttcccggcagtgttagacgtctcaatatcgccgagccccgcggtaatccgctcatcatcccctttgaataaatcaccgataaacggcatcactacaggagccgcccctgccgaaccgattccctgcagcacccgccccgccaagataatgggataaggatgcttgaacgcggtggaagctatcgcggcaagcgctccgcccgcaccggctatgagaagacaaggcagaagaaccttttttcttccgaatttatcggacagatatccggcaatcggaatacaaataatcgccacaatcgaatagaccgttataattaacgatacttgaaaagacgatatggacagcttcttttcaatcatcggaagcacaggaatcagcatggaattcccgagtgtcatcacgagcggtacagaagccagagcaatgatatttttcgttccatttttcttcttactcaacttattcacccattcactatacttggttgtttcctgttttattgtgccttgcagaaaacaaagtatgtactgaaacggcaaataaaaaaacagacacatgacgcgtctgtcttaaaaacgttttcttacaacatgaaaactgaacttatcagcccggaaataatttaatgaatacagcacaggttcatcattctgattatagtgggtttgcttcagcaataaaagcgccgtctccggctcgcattccaaaaccggtgaaatcgtatcgtgatatccgatcggttcgatatcagcaacggcatagctgataacagatccggagtttttttccaaaagatcaaaaatagactcctgttcatgacagaaagaattcggcagaatgtgcatcggaatcgtatctaaacagtaaacgaccggagtgccgcttgccgttctcacgcgttccaaataaaaaagctcctgctcaggctcaagccggaatctagcgatatcttcatcagacggcgtgatgacctgagacgacaaaaaaatcgtacccggcaccatgttcgcctgctgaatcgttttcgtcacgctgttgagctgttcaatacctgaaagaaacagcggttttgtatggacgaaagtgcccacaccgtgccttctgataatcacatgctcctcttcaaggatacgcaaagcttcacgcagagttgcccggctgacacccattgattttgaaagctcaaattcagaaggaagcttttccttttcggtgtaaattccgttttgtatatcctctttgattcgctcaatcacttttagatacaagtgacgattgtcagcttttgtagacatgtttcccctccgtaaaccactttcataaattattgaacaattgggacaactatatcatgttttaataaaaaaataaataggaatgattttgggtgatatcattttcagtgaaaactctctcctttttaagaagagagctcatcatattgttccttagataatagtacttccctcggtttgcttccttcatacggcccgacgacgccccgttcctccattgcgtcaatcagacgggcagctctcgtatatccgattctgaaccgcctttggagcatggagactgatgccgtctgcatgccgataatcaaatcgaccgcttcgtcatagagatcatccgttacttcactgtgtgtttccgaaacttcttccggaatcatctcttcttggtactgcgctttttgctgcgtaatgacatgatcaacgacatgctcaacctcttcatcggataagaatgccccttgcacacgcaccggcttatttgcgcctacaggcagaaacagcatgtctccgcgccccagaagcttttcagcgccgcccatgtctaaaatcgtccgtgaatcggtctgagaggagacactgaaggcgattcttgacgggatgttggctttaataacaccggtaataacgtcgactgaaggccgctgtgtcgcgataatcaaatgaattcccgccgcccgcgccatctgtgaaagtctcgtaattgaatcttccacgtcggaagaagcgaccatcatcagatcggcaagctcgtcaacgatgacgacgatgtacggcagctcaggctgcttgacttcttcttcggcatttgaccgcttaatatgatcgttatagccttctatatttctcgtacccgtatgggagaacagctcatagcggcgctccatctcattgacgacctttttcaaagcctgcgaggcctttttcggatctgtcacgaccggcgcaagcagatgaggaatgccgttatacacattcagctcaaccattttcgggtcaatcatcatcatcttcacttcatgcggtttggccctcatcagaatgctcgtaataataccgttgacacagacgctttttccgcttcccgttgcccccgctacgagcaggtggggcattttgttcagttcggcaagcacggcttccccggaaatatttcgtcccaagccgatcagaagcttcgcgtccggcttgtcattgagcttggattcaagcacttcttttaacgaaaccatcgcaacttcagcattgggcacctcgatgccgattgccgatttacccggaatcggcgcttcgatccggatatccttcgcggcaagcgcgagcgcgaggtcatcgctcagattcacgattttactgactttgaccccgacgtccggatacacctcatattttgtgaccgccggaccgagatgaacctgcgtcactttcgcctttaccccgaagctttgaaaagtccgttcgagttttcttgcattctcgtaaatgtttttcttatcggtctgctggccggtatgtttcgggtcagccagtatgtccagtgaaggcatttgataatctttattttcaagctctgtaaacgtcatcggcggagccgcagccgtttcgccactgtcttgagcgccgccggaaggctcatcttttgccgcttgtgcagcctcctgcgttttttccggaatcagcggttcggcgggctcttcctgacggtctgaaaagcttgaaataatcggctctgaatggatgatcggcgaaatgatttcctcatcctcttcctccggttcaggctcttcttttttcttttgaacccgtttttgttttttgcccgattttgtttttgttttcggcgaagacatgttcgttctgaccgttttcatatcctcaagaaatgcctgccattgactgcggataaaccggccgacggggctcgtccactttttgagcgtttcctgcagtgaacggcccgttacaagaatcagccccattaagatcagcacgatcgccatgatttgtgaacccgttgatgcaaataaaaagtgggaagctgcaaacagtaccgcgccgatcatgccgccgcccaaatcaggggaagcagcctgctgtttcatgtcaatcataaacagctcccacgtgttgccgatgacacttgccgaccgaatcgacccgtgatgagacagatttttaaagagctgcacgtgagacagcagcaatatactggcgataatacagtacagccctgcctttcttctcgttaaaaggcttggactcttctttttccaaaacagcgaaattccgagaaggaagagcgcaattaagcataaaataaaccactctccggcaaaaaaacggaacaagtacacaaatgtctgtcccacaacgccgagctgcaaaacagcaataattgagattgcaacacagagcagtccgcttagttcgtattttagattgagcttactctcttgtttctttttagatttccgttttttctttgccacactcatcaccttactgcgttaaaaaatgtaaaatcatacatcatgaagaaaagcagccttttgccggctgcatttttctgtaggattcccctattatagcatattttgccccccgagaaacggactgaatgccggttagattttcagcttgattttttgtcccggagcgatgtccggattcagaaaatccatcgggttcgtacttaaaatctgtacgacttcagcttcatttcccttcatctcaactagcagcggcacgccggcgtaatctacctgttcatgcacgctttgctctatatcctgaccgtaaacgacttcttggggcatgacggtataaaggatcattgaatcatccttccttcctcgccctttcgttcctcaatcagctgattcagcttttttatcgcctgtccgacgccgcccacggcatcaattaatccgtaatcagccgcatctttcccgactacgttcgtcccgatgtccctggttaagtttccttttgaaaacatcagctctttgaatttttcttcggaaatatttgaatgatgggtcacaaagttgacgacccgctcctgcattttgtccaagtattcaaatgtttgcggaaccccgataaccagacctgtaagccgaacggggtgaatggtcatagtcgctgtttccgcgataaaactatgatcacatgacacggcgatcggcacacctatcgagtgtcccccgccgagtacgattgagacggtcggttttgataaggatgcgagcatttccgcaatcgcaagccccgcttccacatcgcctccgacggtgtttaagatgatcagaagtccttcgattttcggattttgctcaatggcgacgatttgcggaatgacgtgttcatatttggttgttttattttgcggcgggagctggacgtgcccctcaatttggccgatgatcgtcaggcagtgaatattgctatcttgggacatttgcggcagagatgtctctcccagctgctgaattttgctcataatgctgtctttcgcatctgatttttcgggctgctgttcttcggtgttttccatacgatgatccattttatctttcaccctttccgaatgtctctttgtattatgaacaaagatgatgatttccatccgggacatgaacaaaaacaaagccggagcatcatgcgctccggctttgtatacattatacttccataatgatcggaatgatcatcggcttgcgttttgttttttcataaaggaattgattcagcgcatcacgcattgcttgtttcagcgtggaccattctacggcagatgtttccgtcgcttcagtcacgatagagcggacgagctcagtagcttgtacaattagaccctctgattctctgacatacacgaaaccgcgcgtaatgatctcaggacctgatacgaggttctttttctgcttatcgagtgaaatcacgacgatgagaatgccgtcttgtgacaataagcggcggtctctcagcacgatgttgccgatgtcgccgactccgaggccgtcaatcagaacgtttccgtacgtgactttatccccgattttcacattctggccgcggaattcaacgacgtcacctttttcaatcaagaaaatgtcgctgcgtttcatgccgatctcttctgcgattttggaatgcgctttttgcattctgaattcaccgttaaccggaattaaatatttcggtttcagcaaattaagcatgagtttcaattcttcctgcgaaccgtgaccggacacatgcacgcgcttttgggcgaaaatgacttgagcgccggcgcgggcaagcaggttgacggttttggaatatatcaattcatgccccggaatcggtgttgatgcaatgacaacggtgtctccttcttcaatgttaagctgcttgtgcgcctgcttggccatccgcgtaagagcggccagcggctcaccatggcttccggctgtaacaattgccacttcccgcttcggatattttttcacatcctgcacaggaataaacatttcatcttcggcttcaatatagccgagcttgcgcccaagctgaagcacgttttgcagattttttccggcgattgcaagtttgcggccgttctggacggcagcctgtatcacttgctggatccggttgatattagacgcgaatacagcaatgatgacacggttttctgaattgttcatcgcatcggaaatttcaccgcttacatatgcttcggacggagtataccccgggcgctccgcattggcgctgtcagaaagcagggcgagcacgccgctgtttccgattttggcaatttcgccaatatcacatgattggtgataagcaggcgtctggtcaaatttaaagtctcccgtgcatacaatagagccaagtgatgttttgaagctgactcccactgaatccggaatactgtgaatcgttttaaagaacgatactttcgttgattcaaatgtaatgactgatttagagtgaacttcacgcaaatcagcttttcgattatgcccgtactgcttgagtttttctctcagtaatgcaagcgtaagcttcgttccgtataccggcaccgacagcttattcaataaataaaagacgcccccgatgttttcatcgtgcccgtgtgtcagaaagatggccttcacgcggtcagcccgttctactaagtaggaaatatccggaatgacgacatcaataccgagcatttcattttcagggtgcatcagccctgcatccactacaaatatgtctgagtcaatttcaatgacatataggttcttcccaatttctccaacgccgccaagggcgataattctgacgttttctgtatttttctttttcaaaatctgtatcctcctagtctcatacccgtccatcatcacttgttcctattataactgatatcaattttagaaaacaagaagaagcggaaggtttagggaaaaccaatatgtatacaaaacggtcaaactcacgataaaaatgagaatgaccgcgtattttaactgtataaattttttcttacagttcgctgatgacgctgctcaggctcagacgttcatcttcattcagcgggataagaggaagacgcacagatccgacatcaaggcctttcagctgtagcgccgttttgaccggagccggattaggcgctttaaagagctccttcatgatcggcagaagcttctgatgaatcagtgccgcggttgccgtctgcccgttcgtatagtttttaatcatctgctgcatgtcagaacctacgatatggctggccactgacacgactcctcttccgccgactgcgagaataggaagcgttaacccgtcatcacctgaatagacgtaaaaatcttccggtgtttcggcaatgattttcgtaatggcatcaagatcgccgctcgcttctttaatcgcagagatattcggaatctccgcaagtctgatggccgtttccggcgcaagcgaagcgaccgttctgcccggcacgttgtaaagcatcacaggaagagacgtttcttcagctatggctttaaaatgacggtacatcccctcttgggaaggcttattataatacggcgtgacaagcataacgcaatcgacgccggcttcttcagctttttttgtcagtttaatggagtctttcgtattgttgcttcccgtacccgcaataacaggcacgcgtccgttcacttctttgactgtaaattcaaagagtgcaattttttcttccgttgaaagtgtcggggattcgccggtcgtgcctgcgacgactaaagaatccgtgccgtttttcaacaaatagtcgattaatgtagacagtttttgaaagtctacattccctttactgtcaaagggggtaatcatcgctgtagatatatttccgacattcatttttttcacctcatcatgattcaatcacatttactttgaaagttcaaacacttcatgcagcgcatttacggccgttaccatatctttttcatgaacgagcacccagatcgtcgtatggctgtcggcagattgcagaatcggaatgcctttatcagaaagtgcggagacgattttagacgtgacacccggaacacccattattccggcgccgaccgctgacactttcgcacagctttccgtcactgtcggctcatatcctaattcagccaaaatgctgcgcgcggcttccgttttactgccggctacggtatatacgatttcactcggcgtaatgttaaagaaatctacgctgattccggcatttgccattgctttaaagacttcagtctgaacgttgtattgccccattttggcgggaaccttaaattgcgtcacatctttcacatgggcgatccccgtgatcagccgttcgaatacatcgctgccgatgttagacgaatgatgggacgtcaccaaagtgcctttgtcttttgaataagtggagcgcacgcggatcggcacctttgcctgcatggcgatttccaccgcgcgcggatgaatgactttcgcgccttgataggcaaggttgcagatttccgtatatgtgacgttcggaagcggcttagcattttccacgattctcggatcggctgtcataacgccttccacgtccgtaaaaatgtcgataaactcagcatctaccgccgcgccgagcgccgctgctgaagtatcgcttcctcctctgccgatcgtcgtcgtgtcgcctttttcagtcgctccctgaaatcccgcgacaacgacagcgtcatggctggcgagtgcagcgaaaagccgctctgttttcatttctataattttggcgtcagtatgctgggcattggttaaaaagccggcctgggctcctgttaaagctgcggcttttatgccgttttccttcagcatgctggaaaaaacaacggacgaaatcgtttctccgcaagacagaagcatatcctgctctctcggagaaatgtcggactggctgccgtaaaggagcccgattaaagaatctgtcgcgtacgggtctccttttcttcccatcgccgatacgacaacaacaactttataaccttcactgatggcatctttaatgtgtgctagcgcaagcttgcggcctttgtcatcttttacggatgttccgccgaatttttgaacaatgatcttcactattttcactccaaattagtctgacgtaacagaagagagcaggcagagccttactctcttctgttcgcctatagaaaatacgtttgttttatacgaggttcagtttttgcaggctttccgcgatttgaactgagttccaagcggcgccttttaacaggttatcagaaacaacccacaaatgaaaaccgtttgctctgtccaaatctttacggattcttcctacaaatacatcgcgtttgccgacgcaatcagcaggcatcgggtaaagctgctccgccggatcatcctgaagcgtaacacccggagcttcttttaaaagctgtttaatatcttcaacggttgcgtcatcacggtcaagctcaatgtaaacagattctgagtgccctgtttcaatcggcagtctgacacatgtcgcagccacttccagcttcggcatatgcatgatttttttcgtttcattaatcattttcatttcctcaaacgtatagccgttatcttggaatttatcaatttgcggaatggcgttaaatgcgatttgataatgctttttgtcgcctttaaccggcataatggacggttctgcaggttcattgtttaaaatcgcctttgtctggctgtacaattccttcgccgcttcattgccggccccggacacagcttggtaagtagatacaatgacttttttcaaaccgtacgctttgcggatcggttcaagcgcagccaccatctgaatcgttgaacagttagggttggcgataatgccgttatgtttgtgcagatcaccttcgttcacctcaggcaccacgagcggtgtattttcgtccatccggaatgcgctggtattgtcaatcacgatggctccccgttttacagcctcaggcgccaagctttgtgatacgcttccgccggcgctgaataacgcgatatgaacgccttcgaagctttcaggaacagcttcctgcactgtatattcttcgcctttaaacgttactttcgtaccagcagaacgctttgaggatagtagtgtgagtgtttcgatttcaaagtttctgtcttccagtgttttcagcatttgctgtcctacggctcccgtcgctccgacaactgctacgtgtaatcctcttcccatctgtaaaactccttccgccaattaagcatcatttgttgaattgactttgcattttacgttttattttaccatagaatagtcacggattgaccgaatttttttattccggaatgattttctgtcatcatgattttttattcatgatggtgtacgagcaccggctgaacttgctggtgcaaaagagctttttctaccgtaatcggaaggagatccattctggcgacgagcgatgtcggttttttcacgtggtcgtcctggccgaacgggatgaaatatatgttttttgcggacatcagcctcattaaattcgttccgtttaaaccgagtccgtcgtttgtcgaaattccgagcacgaccgggcggccgttgcggatcgtggctttcgcagccataaggacggggctgtcagtcatcgcatttgcgagtttgctcattgaatttccggttaaaggggcgatgaccatgcagtcgagcggaagtttcggcccgagaggctccgcttttacgatggaatcaatcgcctcaaagcctgttgcttcttcaatttttctgacccaatctcccccctccccaaagcgggtatcggtcgattgaacggttgatgtcacgaccggccggacttcagctccttgactgataagcgcctctatttgcggaaaaacttcctcatatgtgcaatgcgagccggttaatccgaatccgattcttttccctttcagagacatggttatttcccctctttctttaagtctgccaaaagcttgctcaatacgttcgcaataatctgtccggctgttttcggggccacaattcccggaagacccggagcaagcagcgctttaatgccttgtttttcagcatatttgaaatccgttccgcccggacgggatgctaaatccaaaatcaaggtcttcggcgtcatgcgcgataaaacgctttgattcagaatcaagctcggtacggtgttaatgcagatatcaatatcatttacatgttcagtaagctcttcaagttgaaaaggagaaagccccatttccgttatacgggccaaatgagccgaactccgcgcgcccacttttaccttcgcccctaacgccgcaaacgtccgggcgatcgtcataccggtgcgccccatgccgagaacggcgacatttgatccgtgaatggtataatccgtatgctgaatcgccatcatgattgttccttcaacagtgggaatcgagttgaatatcgcgatatcgtcccgttcaaataatttcacaagtttgcggccggcttcgctggcgatcccctcaagatacgcgttggagatgcctgaataaatgacgcaatgctccggtgtccgctcaagatagctctgctttaataccacttcttcatttgaaaaaaccgtggaaacaacgccttctccggtcgttgccgatacgggcaggatgatactgtctattttttgaaagggaatctcatcgattttgcatttgacggttcctgtaaaaccgtcatccaattggtcaaaccctgcaagataaatatcggcatgctgttctgtcagctttcttataatctcaagctgtcttgcgtcaccgccaatgatcgcaattgtcaatccggttaacatctgaaacgttcaccttctttacagttactggatcttttaagtgtcatcctcctcttcatcgtatgtgcaaagagaaagggcggtgaatgtacagcgtctttttcatgaaaaaagcaccggctgtatgagccggtgcttgcaaaaaatgaataagatctactcttcgggaggcgtgatctcccccggaacgtctaaaatgatcatgtctgatccgattttttggatatgattccaggggacgcggatgtcgtggccttgttttcgcaatccgaaccattttaccgtcggtatcaacagcgcggtaatttgtccgtcctgttcattaatttccaaatcggtctggccgagcacgccgagccgctctgcccgtttaatgtccacaatttctttacctgaaagttcactgagcctcatgatagccacccccttgtactatatgacccggagcaaaaaaaaatgcctgccccgtatagaggcagactgcttttccgattaagacgaggccggcatattgccggtcgggctgatgagcgatagtgcgtaatcatccgtaaataagcggcggctgaggccgttgacgctttccaggctgaccgcatttaattcagtgataatttcatccatggtcttatgctttccgagcaggagttcgtttttcccgttccggctcattttgctgtttgtgctctctaagctgagcattaagctccccttcatttgctctttgctgttttccagctctttcggggtgataccgtcacgttttagaaccgataacgtttcctgaatggtttcagacagaagtccgagctgattcgcgccggtgcctccgtaaatcgtcagcataccgctgtcttcataggaactgtgatagctgtatacagaataggccagtcctttatcttcgcgcacatcctggaaaagacggctgctcatgcttccgcccagcacgttgtttaagacgatcaaatcgtaaatgtccggatctccgactttcaggcctttgaaaccgagacagagatgcgcctgttcggtgtctttttttctggtcagcttttcataatgaaactcaggctcgctgatgccgcttgctttgcccttcgcttcgtatgtaccgaaccatttctccacgtctttaatgaattgttccgttacatttccggcgacagaaatgacgacgcggtccggcgtgtaaaagtcatccatatgctgtctgagagaatcgccgttaaatgacgaaagcgtttcctccgtcccgagaatcgggtagccgagcgaatgattgccgtatgtcgctttgctcagcagatcgtggacaatgtcatccggcgcgtcttcatacattttgatttcttcatatacgacgttcttttcttttttgagctcatcttcgtcaaaagcagaatgaaagaacatatcagccagcacatcaagtgcgtagtttgcatgctcatccagcactttggcgtaatagcacgtatattcttttgaagtgaaggcattcacttggccgcctatccgatcgaaggattctgcgatttcccgtgcggacctggtatttgttcctttaaaaaacatatgctcaagaaagtgcgaaataccgtttgtatccggcgtttcatgacgtgaccccgtcccgatccagacaccgattgccacagaccgcaccgttggattattttcaagcacaactcttacaccgttttggcatgtatagcgttttatcaagtctgttcctcctattcaaaagacaggcaaactgccgcctgctacttcatcagcctgttttcatccattaagtcagacactgagccgagcgcgtagcctttttctttgatttttgcaatcagtgtatccaggcttttcgcagtcggatcagtcggatgcattaaaatcatggctccattatgtattttgctcaacacccttgtttgtaaaacagccggagacggtttttgccagtcaatggtgtccacggtccacatgatggtgcccattcctttttccgccgcaagatcgaccacggcttttctgaagctgccgcttggcggcgcaaaccatttcggctttatgcctagcgtctcgctgatttgtgcattggttttgtcaagctgttcggaaatgcttcctgaagtcagtttgctcatatcagggtgattgtatgaatgatttccgatttcatgtccgtctgccgctatttttttccccagttcctgattgtttttcagccatttcccttcaagaaagaaagttgctttgacctggtgctgcttcagaataggcagcatttgctccacgtattcatttccccaggcgacatttatcaggaaagcgaccatcggtttgtcgggatttcctttataaatgggttcgggcgcgagagaatcaagatggactttcggttttacctgctcatagacaaggccgtcttcgtgaaattctccgtcctttttcatttgttcataggatttttccacattgacttttaaaccgttatatcccggtatactcttccatattttatcaatccgcgcgtcttgcggcttcacttcatactctgacgctttttgcagtaattcttcatagagcggatcttttgatgctgacacagttacagcgtcttttttcattgcgtctatgtaatcaactgtatacgggttttttaacatttcaaacgaaacaaaaaaaagaaataaaaaaacggcaaacggcacgaattttttcaacatgtccttcccccctcctcacacattatgtatgaggaggacaaggtagaacccgtctgttgtctttctcaaaataaagaagccgggtctcccaggctccttgttaggttttcatttaagattgttgttgttcctgttctttttctttctcttcgcgcagcactgctttacgcgacagattcactcgtccctgtttgtcaatttcagttaccttcacaaggatttcgtcaccgattttcacaacatcctcaaccttgccgacccgttcgagcgctagttcagagatgtgaacgagaccgtcttttccgctgaagatttcaacgaaagcgccgaatttctcaatccgtttgactttaccgaggtaaagctggccgacttcgacttctctgacaagatcttcgatgatttttttcgctttttggttgctgctttcatcagtagaagaaataaagatggtgccgtcttgttcaatgtcaattttaacaccggtatcttcaatgattttgttgatttgtttaccgctcggtccgataacgtcacggattttatccggattaatgttcatcgttaaaattttcggcgcatattgagaaagttcttttcttgattcaccaagcgtgctgagcatgctgttcaagatttccattcttccttttttcgcctgctgaagcgcttcttcaagaatttctcttgaaaggccttcaattttaatgtccatttgcagcgctgtcacgcctttttccgtgccggctactttaaaatccatgtcaccgagggcgtcttccatcccttgaatatccgttaataccgtatagtactcgcctgatttcacaagtcccatcgcgatacccgcaacaggggctttaatcggaacacctgcgtccatcatggcaagcgtgctcgcgcaaatgctggcctgtgaagtggaaccgtttgattcaagcacttcggatacgagacggaccgtatacgggaagtctttttcattcggaatgaccggctcaagcgcacgctctccaagagcaccgtgaccgatctcacggcgtcccggtccgcgcatcgggcctgtctcccctacgctgaactgcgggaagttataatgatgcataaagcgttttgattcttccacgcctaaaccgtcaagaatctgaacgtccccaagggcgcctaatgtacaaacgctgagcgcctgcgtctgtcctcgcgtaaacagcccggagccatgcgttctcggcagaaggccgacttctgaagaaagcgggcggatttgatcaacgccgcggccgtccggacggactttttcttctgtgatcaaacggcgcacttcgtttttcacgagtttagacagtgtctgtttcacttttttaatcgtatcttcatcatgctcttcttcttcgaatttcgcgacaactgcatttttcacttcattgatcgcgtcttcgcgagcatgtttttcgtgaacctgaatggcgctgagaagatccggctccgcaaggctttttactttttcgctgagctcttcgtcaatttcatacagttcgatttccgttttctctttgccgactgccgcgacgatttcttcttggaatgcgatcaggcgcttaatttcttcgtgaccgaacataatcgcctcaagcatgatttcttcaggaacttcatccgctccggcttccaccatgttgatggcgtcttttgtgcctgcaacgatgaggttgatatcacttttttcaagctggtcaaccgtcggattgatgacgaatttcccgtcaatgcggcctaccgtcacacccgcgatcgggccttcaaacgggatatcggaaacgcaaagagcgagtgatgaaccgaacattgcagccatttcagatgagcagtcctgatcaacactcatgacaatgctgatgacctgtacttcgttgcggaatccgtctgcgaaaagcgggcggatcggacggtcaatcagacggctggctaaaacggccttttcacttggacggccttctcttttaataaaaccgcccggaattttacctactgcatataatctttcttcatagttaacggtaagcgggaaaaaatctagcggtttcggttcttttgatgcggttgctgtgctgagcactgcagtatcgccgtagcggaccatgacagcgccgtttgcctgtttggcaagctggccggcttctactgtaagctgtctgccggcccaatctatggtaaagacatgtttctcttgtcccattcgattacgagctcctctcttaatgtgtgaaataatcaattactcctattatgaacgaaatgaattgaacatatcaatgtcaaagtagtatgtaaaaggatttcattgttttttatcattatttttttcgctttaatacgataaaaaagcgggaatcctcccgctttttacgattatcgacgtaagcctagtttgttaattaactcacggtaacgagttacgtctttattacgcagatacgtaagaagattacgacgtttacctaccattttaagaagaccgcgacgtgagtggtgatctttcttgtgagtacgcaaatgctcgttcaagttgttaattgagtctgttaggatagcgatctgaacttctggagatccagtatcagattcgtgtgttttgaactcactgatgagttgatttttacgctcttgagtaattgccatcctgtttcacctccatatcataattagccccagttacctagcaaccgtcggtgacttcggattgccaagcaatggttttaagactacgaaacatatgatactaaaaatcgcgcccatatgcaaatcttttagaagaaaatttgtgtacttttgatgttttttccgttatttgctgaaaaaacggatcgcttcttgtttgtctttcccgatctgagccgtcagttcatcgatgccgttaaacttccgttcgcttcggattcgtttgtaccactcgattttaacgtcttctccgtatacatcctgttgaaaattaaacaaatgtacttcaattgacggctgatcgggacgcttttcataaaaggtcggtttgtagccgatgttgcagacgccttcatacacctcgccttttatttcggctttcactgcatacacgcctgtcggcggcacgatataactgttgtgcaggccgacattcgcggtcggaaaaccgatggtgcgacctcttttgtctccgtgaatcacagtgccccggacaaaatacggctggccgagaagagtgtgcgcaagttcaacgtcaccatcctgcagcgctgaccggatataagtggagctgatctttctgtcctgctcggtctgtttctcgacagtcgtgcatccggccttgccgtttaaatcgtccggcagcgtctccatcgtgccttttccgtattttccgtacgtaaaatcgaagcctcccacagcgtgccgcgcgtttaaccctaaaatatactcctcggcaaactgttttggagacagagacgcaaacgcttcatcaaactttacgacatacagcacatcagcgcctaaacgcccgatctggctgattttatcttcaagcggcgtaatcagatcctttggctctttgtccctgcccaacacatgggaagggtggggatgaaacgtcataacggccagcgacaggcctttttcttcggctatttgtctggctgttccgattactttccggtgtcccaaatgaacgccgtcaaagtagccgagcgccatgacagacgccggctgctcttctttttgtaaatgatgcggatgagaaatatgtatcgtcttcacagaacggtcaccttttttcttattgttcgcttttttgcatgagcactttagccggtttcagcagtcctttttttgaaggatgcggcatataaatggccacacattctccgtcttcagtacagagcgctatacgggcgtcagctgtcattgcagaaaattccgccgggatgtcaaacactgacccgttttcagctttcttagctaatgtatcacttatgacccatttcggcaaatgattgagcgctctatcgatcggcacggcatgctctgcaaccgttccgtctgaaacctgctgttcaagttcctcaaacgtgaaacactcatcaaggctgaaatcgccggaagcggtgcggatgagatgcgacatatgcgcgggatagccgagtttttcaccgattgtcaccgccaatgttctcacgtaagtgccctttgagcacgtgactgtaaagcggaatgatgctgtgtcttctttataagtgacaggggaagtgagcgcgatatcttcaatcgtgatattccgcttcggccgctccacttcaataccggctctggcgtattcatagagctttttcccgttgacctttacagcggaatacatcggcggcacttgctcctgcggtcccttcagttcgtctaaaacggctttgatatccgcttctttcagcggctccttgacaggttttacgctgaccgtttctccagtctggtcttcggtcgatgtggagaagccgagagtgatctcagcatcgtacgtttttgacttgtcggtgacgtactcaacaatctttgtggcccgtccgacacagatcggcagtacgcctgacacttccggatcaagcgttcccgtatgtccgactttctttgtttttaacagttttcttattttcattacacagtcgtgagaagtcatgccgaccggtttatgtaaaaggagaactccgttaaccatatgtctttcgctcctttgttatcaattgtatcccgtaaaacgcagaaaagaggacagacgacactcgcccatcctctttccttgttattcagacggtttatctgaatgcagttcgtgaatcaatgtttcaatacggttgccgtactcaattgattcatcaaattcaaattcaagctcaggcgttttgcggagtctgattcggctgccgatttcggaacggataaatcctttcgctttctcaagccctttcagcgcctcctctttctttttctctccgccgagaacggagatatacaccttcgctatttgtaaatcacctgaaacacgtacgtctgttacagtgagaaatccgattctcgggtctttcagctttcggctgataatatccccgagctcttttttcatctgctcgccgacacggtttgctctcatactcaattcaatcacctctaagttaaaaccactctgttctagtgatcgtccgttctatttcgggaaaggagtcaataaacgcgagtacgcgctggatctccttttccgcctgaacgtgagaggaggagacgacagcgattccgaagctggtccgctgccaagtgtcctgatagccgatttctgcggccgacacgttgaacttattctgaaccctcgttataatccgcttcagaacggctcgtttctcctttaatgatcccgcatcataaatgatgcattcacattccgcaaatccgatcactttctttcgatttcctgcatgacatacgcttcaatgatgtcgccttcgcgaatgtcattgtatttcttaattgtaataccacattcatatccttgtgaaacttctttcacatcatctttgaagcgtttcagaacgtctacttccccttcgaagatgaccacgccgtcacggatcaggcggagtccgctgtcacgtgtaatgtggccgtctgttacatatccgccggcaatcgtgccgattttcgacactttgaatgtttggcgcacttcaacctggccgatgactttttcttcgtattcaggatcaagcattcctttcatcgccgcttcaatttcttcgatgactttgtaaatgatacggtgaagacggatatctacattttcagcttcagccgtgctcttagcatttccgtctgggcgcacattaaacccgataacgattgcatttgaagcagatgcgagaatgatgtctgattccgtaatcgcaccgacgcctgtgtgaatgattttcacttttacgccttctacttcaattttttgaagagcggctgttaacgcttcggctgaaccttgaacgtcagcttttacgattaaattgatgtctttgacatcgccttgtttaatttgttcaaacagatcatcgaggctcagcttcgctttgtcgctgcgctgttcttccagttgcttggaagcgcgtgcttcaccgacagaacgggctgttttttcgtctttaaagacgaggaattgatcgccagcctgcggtacgtcgtttaagcccgtgatttctacaggtgtggacggtccggctgttttcacgcggcggccgagatcattgaccatggcccgcacgcggccgaatgtatttccgacaacgatcggatctccgacattcaatgttcccgtttgaacgagaagtgtcgcgacagaccctcttcctttatcgagctcagcttcaataaccgttccttttgcctgacggttcggattggctttcagctcttccacttcactgacaagcagaatcatttcgacaagctcgtcaattcccttgcctgtaagagcggacagaggaacgaaaatcgtttctcctccccatgcttcaggaacgagtccgtattcagtcagctcctgcatgacacggtcagggttcgcgctttctttatccactttattcacggcaacgataatcggaacctcagccgctttcgcatggttgatggcttcgactgtctgcggcataacgccgtcatcagccgctacgactaaaatggtaatatcagttacttccgcaccgcgtgcacgcattgttgtgaacgccgcgtgtcccggagtatctaagaacgtgatttttttgccgttttcttcgatctggtaagccccgatatgctgggtgattccgccggcttcaccttcaacaacttttgtttttctgatgctgtcaaggagggtcgttttcccgtggtcaacgtggcccatgatcgtcacgacaggcggacggatttgaagatcttcttctttgtcagcctcttcatatttttcaagctcagtttcttcaagcacaatcacttcttctgtttctacaccgtattcagatgcgatcagttcgattgtgtctttgtcaagctcctggttaatggtagccattacgcccagaagcatcagttttttaatgagttcagacggctctttgcccagttcctcggctaaagctccgactgttaaagagccggaaaacgtaattttctcaggaagctcttttttcggcttcagcggtttttgctgatactgatttttgttgttatgattgcgtttgtttttgtttttgttgttgttgttattcttcttgtttttgttaaattgattattctgcacgtcattcttctttccgtctcgaattttgtttggttgattcccagcaggctgctgattaatcccttgcggcttgtttttgttcgtttccgcaggcttctgagatgtaacgccggcgccgccttttttaaatttcgcatcaagctgcttaatggtcttttcttcaagcattgccatatggttatttactactatatccatgtttttcagcgcagtcaaaatttccttgcttgaaacattgatggcttttgcatattcgtaaactctcattttagccattcgttcacccccaaaaatattaatcgagcaagctgatcagcttattcgcaaaaccttggtcagtgacggcgacaacgacacgtgattccttgccgatagagcggccgagatcagcgcggctttcgacttttttataaggcactttataataattgcatttatcggatactttttttgcagtattcgcagatgcatcttctgtcagcagaacaagttttgcacgcgcatttctaatttcttttataaccaagtcctcgcccgacacgaccttacgagctcgattggccagacccagcaagggaaaccattccattccagacatgttattttttcaccttttccgccagttccagcaattcttcgaaaatctggtcatcgatttgtgattgaaattgattttgcaatgtgtttttctttttcgcagctaagatgcattctttctcaagggtgatataggcaccccgcccgttcttctttccggtcggatcgactgaaatctctccttctttagaacggacaattcggatcagttcctttttaggcttcatttcccccgttaccacgcatttgcgcagaggaattttttttcgcttattcacctaaagtcacctcttattcatccgattcggctgtttcaggctccataaagagcggctctaaatcgtcatcttcttcatgctctctcggatagatgccaaggtctcttgcatccgtttcacttttgatatcgattttccagcctgtcagtttcgcagctaagcgggcgttttgccctctttttccgattgccagagaaagctggtaatcaggaacgatgacattcgtggctttttcttcttcgctgacgatgacatccagcactttagacgggctgagcgcattggcaacaaattcaaccggatcatcagaccagttgacgatatcaattttttcgcctttcagttcattgacgatcgcctgcacgcgctgacctttaggaccgacgcatgaaccgaccggatcaacgtcagggtcatcagtgcggacggagattttagagcggtcgcccgcttctctggcaacggatttcagttcgaccgttccgtcataaatttccggcacttcgatttcaaaaagacgcttcaacagaccagggtgcgttcttgatacatagatctgaggcccttttgtcgttttttcgacttttgtgataaatactttaatccgatcgtgcggtttatagctctcattcggcatttgttcattgacgggcagcagcgcttcaatcttaccgagagacacgtaaataaacttgctgtctaagcgctgtacaattcccgtcatgatgtcttcttcacgatcgataaattctgagtaaatcacgccgcgctcagcttcacggacacgctgcgtcaccacttgtttcgccgtctgcgcagcaatgcggccgaagtctttcggcgttacttctatttcaacgacatctccgacaaggtagttcggatggatgtgctgggcgtcgtcaagcgagatttcaagtcttgaatcgtatacctcgtctacgacatcctttcttgcgaacacgcggatcgtgcccgtctcacggttcagatcgacccgtacgttttgcgcctggttaaaatttcgcttatacgcggaaattaaggcagcttcaattgcttcgatgataatgtctttactgatgcctttttctttttcaagaatagtgagagcatctaatagttcactgctcatgttagcggtctccccccttaaacactaatacttcattcattaaaatgttacagctaatcttgcgttagctattttttcatacggaatattgacccgtttctttcttgttttgaccgtcatctctattgtaacagtttgtccatcgaattcagccaatttgccttcaaacacttttaaaccgtcaatcggttcgtacgttttcatgtacacatttttgcccagtgatttttcgaagtcggcttttttctttaatggacgctcggctccaggagaagatacttcaagaaagtagttctgggtgatcggatcggcctcatccagcttttcgcttaacgcttcgctgactttggcgcactcctcaatatcaacaccgttctcggaatcaataaacacgcgaaggaaccagttttgaccctctttgacaaattcaatgtctacgagttcaagctgaaggtcatccagtatgggctgagccatttcttgaacggtatcagtcacttttttgctcatgtttttcctccttgtgctgtcgatatcatatcagccgttcctctgcataaaaaccctgcttcaaaagagcaggggcattgagaaaacgatggacatgtcgaggcaaaattgcctgttcaatacaaaagagcgggtttccccactctttgcctcggtaatcgttagcatttccaataaaactataccataaccatatatttaatgcaaatcaaactccgctcggaggctgtgcacaaagcttaaaacagagacagctgattttggtccggaagcgactcaagacagccgtgacggtctaaatactctaaaatggtttttgacacttttccgcgtttttgaagatcctcttttgaaaggaactccccttctttccgcgctttcacaatattgagagcggcgttggttccgagtcccggaattgagttgaacggcgggatgagactgttgccgtcaatgataaattccgaagcgctcgaacggtatagatcgaccttctggaaggaatagccgcgctcacacatttcaagcgcaagctctaacacggtaaggaggtttttctccttcggcgaagcatcaagccctttagagctgatatcatccatcaccgctctgatggcggtcgagcctttaatcattgtatcaatgtcaaagtcatctgcgcggacggtaaaatacgcagcataatataaaagcgcgtgatgtactttaaaataggcaatccgcaccgccatcagcacgtatgcggcggcgtgagctttcgggaacatgtatttgatttttttgcatgaatcaatataccagttcggcacattgttctttttcatttcttcttcccattccggcgtcaggcctttgcctttacggacgaattccatgattttaaaggccagtgaaggctcaaggccctgatagatcaagtaaaccataatgtcatcacggcagccgatcacttcgctcagttcacacgtattgttgtgtatcagttcctgcgcattgccgagccatacgtccgttccgtgagaaagtccggaaatctggacaagctcggagaacgtagtcggcttcgtatcctcaagcatctgccgcacaaatcgcgtcccgaattcaggaatgccgagcgtccccgttttacagccgatctgctcttcagtgacgccgagcgattctgtgccttggaaaatcttcataacttccggatcatctgtcggaatcgtcttcggatcaattccgcttaaatcctgaagcatccggatgacggtcggatcatcgtgccccaatatatcaagcttcagcaggttgtcatgaatggagtggaagtcaaaatgagtcgttttccattcagaccccgtcgcatctgccgggaattgtatcggtgaaaaatcgtaaatatccatgtaatccgggacaacgataatcccccccgggtgctggccggtcgttcttttaacaccggtgcagccttgcaccagacggtcgatctccgcgccgcgcatgtgcaggttgtgatcgcccgcatagcctttcacatatccgtaagccgtcttttccgcgacggtgccgatcgttcccgcgcgatacacgttatcttcaccgaacaatactttcgtgtagttatgggcatgcggctgatactcacctgagaagttcaaatcgatatcgggtactttgtcacctttaaagcctaagaacgtttcaaacgggatatcatgtccgtcctttttcaaaggtgtgccgcaagacgggcagcttttatccggaaggtcaaaaccggaaccgactgatccgtcattaaagaattcggaatatcggcagctcgggcacacgtagtgcggagcgagcgggttcacttcagtgatttccgttaaggtcgccacaagcgatgaaccgacggacccccgggagccgacgagataaccgtcatccagagaccgttttacaagcttatgagagatgagataaataacggcgaacccatgaccgatgatactttttaattctttttctattctcgcttccacaatttcgggaagctcttcaccgtaaatgcttctggcgcgctgatagctcatttcacggatttcttcatcagccccgtcaattttcggcgtgtacagatcgtctttgatcggtttgatctcatcgatcatcgaagcgactttctgcgtattgtcaaccacgatttctttcgctttttccgcaccgaggaaggagaaagcctccagcatttcatctgtcgttctgaagtgcactttaggcagttcgtgtctgtttaacgggttggcgccgccttgggaagatattaagatcttccggtaaattttatcctcatcgtttaaatagtggacatttcccgtagccacgaccggcttattcaatttttccccgagcttcgtaatgttggcgatgatttctttcagcgctttttcatcccggacgagctcaagctgcagaaggtgtctgtatacttccggcggctgcacttcaagataatcatagaaggatgcgatatcttcaacctcttcaggagatttttgcatcatgccttcaaagacctcacccctgtcacaggcagagccgattaacagaccttctctgtatttattaagctgcgacctcggaatgcgcggcactcggtagaaatattgaatatgagaaatggacacgagcttaaacagatttttaaggccggtctcatttacggcaagcaatgtagcgtgataaggccttgatctctgataagcattggattgtcccatattctcattcagctgatcatgataaaaaatgtctttttcagcggcatctttgagcattttcaacagcaggtagcccgttgcttcagcgtcaaaaaccgctcggtgatgctgggttaattcgatatcaaacttcttacataacgtatttaagcggtgatttttaaactcaggatacaggaaacgcgcgagttccagcgtatcaatgaccggatttttcgctttttccgttttcaaaagacgcttgtacgctacatttaaaaatcccatatcaaagctggcgttatgagccacaagcacgtcatcgccgatccattctttaaaatcccggacgacatcaacgacatcgggagcgtcgcggaccatgtcgtcagtaatcccggtaagctctatcgtcgttgctgacagcggatggtgcggattggcgaacgcttcgaatttatcgatgatttctccgcctcttattttgactgcggcaagctcaatgatggtgtcatacactgcggacagacctgtcgtttcaacgtcaaagacaacgtatgtgtcttcttccaggagacggtgagctggattgtatgcgatcggaacgccgtcatctacgatattggcttccattccgtaaatcattttaatgccgtgttttttcgcggcggaataggcatccgggaaagactgcacaacggcatgatcagttaacgcaatcgcttcatgtccccattttttcgcctgttcgacaagctttccgatgcccgttacagcatccatttggctcatcggagaatgcagatgaagctcaacccgtttttcgccttcaggagcggtgtcttcacgggttttggcttttatttcattcacgtcatttgcaatcatgacgaggtctctgacgaatgtatcgttttgaatgcttccccgcgcctttacccacatgccttttttcagcgttttcatcaaagcggcgtcttctttttctctggcgaacatttttactaaaatgctgtttgtatagtccgtgattttgaaaatgcagagcgtgcgtccgcttttcagctcgcgtgtttcagcatcaaacacaaacccctgcaccgtaattcttctttcttcatccatgatgctgtcaagcgtccggatttcttcgttctctttaatttgatagccgatgacaagcggtccggacggtgcctgatcctcatcgccctctttttccttcttctccatctcgataagcgcctgcatcgcccgctcctgatcttcagcaagcttttgctcgcggaatttctggacttcttggtcagatacgaaaatttcggtatccagctgcagttccggaaagccgaattggcggtagctgtgctgaatcagcgcgaagtatttatttttgagcgcagatgcttctgtatctgtttttgttttcacgatcagtttgtttcccttgagcttcggcttctgctgattcaaaagagccaccatcggcggcgaggttccttcaagctcttcaatacagcgtgtccaataatcctgtacaagctcctctgtcactgtagggtcgatgacctgaacagacgatgtgacacgggcgatgtgagcaaacgattgtgttaacctcatcatgaatgaatcatatatttgatacggcaaaagagccttaaagcgaaattggaaatgccaggccttttctgctttatggattgtcagtttatcaatctctccgtcttcaaagtatgtcatgaaggtatcatctgtcatattaagctgctgcagaagaatctgaaactgtcttctgtttactgataactgttccattcagacagtatccctcccttaaaacatcataagtgaaggtacctccgcaggtgatgaggtaccttcttttttctctattttaacatgattttgtatgattcgttatggtgattacttcgtcttgataaattcagaaagctcatccactgaaacttcggcagattcaccggttttgcggattttcacttctacgatgccttcgtcggcacgttttccgacagtgatgcggatcggaaggccgatcagatcagaatcagcaaacttcacgcctgcgcgttcagcacggtcatcgtataatacctcataaccttccgcctggaatttgccgtaaagctgttcagcaagctctttttgcgcttcgtttttcatattcagtgccaaaatatgaagatcatacggagcaacgcttttcggccagatcaagcctttttcgtcgtgatgctgttcagcgatggctgaaagcgttctggacacgccgattccgtaacatcccatcagcatcggctgcgcacgcccgttttcatcaaggtatgtcgcattcatcgcttcagagtaacgcgtgccgagtttaaagacttgtccgacctcaatcccttcagcgaaacggatcgtgccttttccgtcaggtgacggatcgccttcctgaatgattcgaagatcggcatatgcttttactgacgcgtcacgttcgatgtttacgtttcggtaatgacggtctttttcattcgcgccgctaacggcgtttaccattactttcacggcttggtcggcataaatctcaatgtcgccggcagcgccgatcggccccgcaaatcccggctccgtgccaagtttctctgctacttcttcatgagacgcaagctcaaccacttccgtgttcagaaggtttttcactttcacgtcattgacctcatgatcgcctcttactaacacgagaacaaatcggtcatcagctttaaacagcattgatttgatgcaggcgctcggctcgatctgcaagaacgaagcgagctcttcaatgcttttgacattaggcgtatcaattttctccaatgcctcgggggtttcatctgacggctcgctgttcatgacaacttccgccatttccgtattggctgcgtaagaggatccatcggaataagcgatggtatcttcccctatttcagaaagagccataaattcatgcgtgtcttttccgcccatcgcgcccgagtcggcaataacgggacggacgtttaattcacagcgtgcgaaaatgctgctgtatgcgccgtacatgttttggtatgtttcctccagactttcttcagaagcatggaaagaatacgcatctttcatgatgaattcgcgtccgcgcaataagccgaaacgcgggcgtttttcatctctgaatttagactggatctggtaaagagtgagcggcagacgcttataagatttcacctcatcgcgcacgagagaagtaatgacttcttcatgcgtcgcgcctaaagcaaattcacggccgtggcggtctttcagacgcattaattcaggcccgtacgtataccacctgcctgattcctgccatgtttcagcctgctgaagggccggcatcagcatttccaccgcgttgattttttccatttcttcacgcacgatcttctgaatgttttgaatgaccctgtaagccaggggcatgtagctgtaaaccccgctcgtattttgtctgataaatcccgctctcagcagaagcttatggctttttgcttcagcatcagccggcacttctctcagggtcggaataagcgtcaaactttgtctcatgtcttcgcacctctgattttttactagtcaattataagaataaacgctggatatcgttccatgtgacaaccagcataagaagcattaagaaagctacgccgataaatacgacaaatgcttccttgtcacggtttatcggcttgccgcggattgcttcaatgaataaaaacagcagccgcccgccgtcaagcgccggtatcggcagcaggttgacaattcccaggttgatgcttaaaaacgccgcaaactggaataggttgataataccggtttttgcaacttgatccgtcatatcataaatgccgacaggacccgaaagcatatcaagcttaaactggcctgtcacaagtttgctcagattggtcaggatcgcttttgtgacatcaacggtagatgtcgcgccgtaggcaatcgctgcaagcgcgcctttttcagtcggcgcataagagccgaagcggccgattgtttttttattttcatcttttacagcttcaggtgtaaccgagatatgaaacgatttgccgtcccgtttgacggcgacatcgattttttttccgggattttcttttaccgctgtcacgatgtcggtccatgacctcattttttcaccgttaatgctctggatatagtcgccttcttttaaaccggcagccgctgcgcgtccattgtctgtcagcttcccgagctcaggctgattcgaaggcacgccttgaatgaatccaagcatgacgagaatgacatacgctaagatgaagttcattatcggaccggcagcaatcgccttaatccgcttccatacgggtttagacccgaattgtcgattgtaaggcgcaatctgcacttcttctccgtctacgataaaaaaagaggtctgactgacagtaaagcccgccagttcatcttctttcccctgctcgtacccggtaatcttcatttcgtgctcaagatcagccgtctccacctcgataattaaagcgtcgggatatttttccttttgattaatgatgactttttccacttcgtcatctttattaaaaagaagcccgacggtataaccgggtttgacttcgatcatctccgggtcttcaccggccatgcggacgaacccgccgaccggaaggagtctgatcgtatacacggtttcattctttttaaatgaaaagattttagggccgaagccgatcgcaaattcacggcaaaggattcccgctctttgggcgagcaataaatgcccgagctcatggaaaaaaacgagcgttccgaaaataataataaacgcgataactgtattcacgaacataccaccttatgtgagtattgaattaacgtatccccgggtgtctttgtccacttcttggatatccgcaagactcggatcctgaattacgctgtggcggtccaatgctttttcaatcaggtcctcaatcgataagaatgaaatccgtccggcaagaaaagcggcaacggcttcttcgttggccgcatttaaaaccgtcggcatcgttccccctattttacctgattcaaaggcaaattgtaagcagcggaacctttcaaagtcagctttcgcaaaatggaggcttccgatctcccataattcaagcctttttgtttcaggcagaggcagacggtccggatatgtcagcgcatattgaatcggcaccctcatgtccggatttccgagctgggcgatgacgcttctgtcgtgaaattcaaccatcgaatgaatgatgctctccttatgtaatacaacgtcaatctgttcatacggaatgtcaaacagccaatgcgcctcaatgacttcaagtcctttattcatcattgtagccgagtcaatcgtaatttttgcgcccatcgaccagttcgggtggttaagggcgtcggcaatcgttacagactcaagctcctgccgcgttttatctctgaaactgccgccggatgccgtaatgatcaggcgctcgatatttttgctctgttcgccttgcagggcttgaaaaatagcggaatgttcgctgtcgaccggaagaagaggaacaccgtatcgttttgcgtgtcctttcactatatgcccggcagtgacaagagtttccttatttgcaagcgcaattgtttttttctgttcaatcgctttcaaagtcgggattaaaccgacgcttccaagcagcgcattgaccacgatatccacttcgtccatgactgccgcttcaatcaggccttcttctccgatgccgatttgacattcatgagaaaaagacgcttctttcactttttggtatgtatccatgtcgccgactgctacatatttcggctgaaacgttctgatcaacgggatcgctttctcggcgtttttaccgaaagtcatcgagacgagacggaactgatcttgatgcatgcgcaatacgtctaacgtctgctcccctattgatcctgttgctcctaaaagacaaatattcttcaaaatgccactcccattctatgcgtccagatcggtcttattttcatattagcctttctcatgaaaaaagcgcaagcagaaagtataagaacggcatgacaaacaaaaagctgtcaaatcgatctaaaatgccgccgtgcccgggaaggatttttcccgaatccttcacatcatagtgccgcttaagcgctgattcaaccaaatccccgatctgtccgaatacagacagaacaagcgtgatgaccaaaagaaccgggtatgaaatcggaaggtgcgcaaacagctgaaaaacagccgtaaaaataagggcgatgacaataccgccgagaaacccttccaccgttttgttgggactgatttcgggccacagcttccgcttcccgagcgactttccgacgaaatatgcgcctgagtccgttgaccatatgacaacgcaggcataaaagatatataaaagcccgtttgtttcaatgtttctgatttcaataaaataatgaaaacacagtccgatatataccgtcgcgagaacgataaacccgacttcatcaaacgtaaaggtgtttttcacgagcaccgtatagctgagcagaatcaatacggcgaaaatcgttacttccattttcgcatcgaaaaaatgatatttgtccggcatcatatacagccataacaacaagaggctgatcagacccggaaaagaaaaaaatctgagctttttcatccgcaaaagctcaaaaagcgctatacttcccatcacgtaaacaaatacggtgaacggcaatcctccgaaaataaccaaaaataaaaataatgccgctgccagaacacctgttaacaatctttgtttcatttccaccatcctctaaattccgccaaacctccggccccgctgctgaaattctcccactgcctgcagaaagtgatcttctttaaaatcgggccacaggacatctgtaaaaacaaattcactgtaagccacctgccaaagcataaagttgctcaatctgatttctccgctcgttctgatgagcagctccgggtcctggattgattctgtcattaaatgcccggaaaagagcgcttcatcaatgtcttcgatattcagcgtgccgcttttcacctgttcagccagtgcttttgccgcattgacgatttccgtgcgtccgccgtagttcaaagcgaaattgagaatcagcccgtcattttgttctgtatcttttacggccttctcaatcgccctgtacgtatgagaagggagcgcggattcatctccgataattttcacctgtacattttcctctattaattcaggaagatacgtattcaggaactcttccggaagcttcatcaaaaagtcgacttccatcttcgggcgcttccagttctccgttgaaaacgcataaagagtcagaactttaacgccgagctgacttgcgagctttgtcaccctttttaccactttcattccttcatgatgtcctgcaatccgagggagtgaacgcttcttcgcccagcgtccgtttccgtccataataatggcaatgtgtgcgggaatttcacccttcagtatgtcttcttttgtataccgttctaagttggaagccgcattctgctgattcttccaatttttgagtatgttgagcatgagattcctccgtcacccaaaaaggttgcgttgctgatgatcaatgtaatcaacagtattaacaaaaaaaccccctgtaaacatgagagggtcttttcacattatctattgtacatagtttttcattaaacttccatgatttctttttctttgtccttcgtgacgctgtcaatttttgacacatattcatctgtcagcttttgaacgtcttcactggaagcacgaagctcgtcttctgtgatgtctccgtttttctcaagttttttgaggtcatcgttgctgtcacggcggacattacggactgctactttcgcttcttccgcgtattttttcacgactttgacaagttctttacgtctttcttccgtcagagccgggatcgcgatgcggataattgtgccgtcacttgtcggcgttacgccaagatcagctttcaaaatcgctttttcaatatcaccgattgccgttttgtcatacggtgtgacaacaagcatacgcgcttcaggcacattgatggaagacagctggtttaaaggtgtttgggcaccgtagtattctactgtcactttatccaatagagatgggttggcacgtcctgcgcggactgacgccaattcacgtgaataagcggcaaccgctttttccatgcgttcttttgtttgtgttaatacttcgtttgacaacgttatttcccccttacgatcgttccgattgattcgccgattacggcacgcttaatatttccttcttccataatagaaaagacgatcagcggaatatcattatccatacatagtgaagaagccgtagaatccatgacttccagcccgtcttttaacacatcgagataagataatttttcgtatttaacagctgactcatcttttctcggatcagcattatacacaccgtcgacattatttttcgccattaagatcacgtccgcttcgatttcagcggcacgcagcgctgcggttgtgtccgtagagaaataagggtttcctgttcccgcggcaaaaataacaacgcgttttttctccaggtggcggatggcttttcttctgatgtaaggctcagcgacctgacgcatttcaattgatgtctgcactctggactgaattccgagcgtttccaggctgtcctgcagggcaagtgagttcatgacagtagcaagcatgcccatataatcggccgtcgcacggtccattcctaagtcactgcccgtttttccgcgccataagttgccgccgcctacgactacggccacttcgacgtcaagctcagcgatttcttttacctgtttagcgatggattggatgacagtcggattaatgccgtttccctgctctcctgccaatgcttctccgctaagctttaaaacgatacgattgtattttggtttttccataataacctccaagtgtaaacattgccgtttcctattatgcaagagaaaaaaaggtttgtaaatatagttttaaaaatagggaacacaagtagtgtcccctatactgcctgaaaagccgcgaaagattcgccaaggctttccgccattattttttcacttggttcataacttcttcagcaaagttttcttggcgtttttcaataccttctccaacttcgtagcggacgtaagttttaacagatgcgtttttcgcagccacaacttgtttcactttttcgtctgggtttttaacgaaggcttggtctaataagcaaatttcttcgaagaatttgttcagacggccttcaaccattttagctacgatgttttccggtttgccttcttgaagagcttgctgagtcagaatctgacgctcatggtttgcttcttcttcagacacttggtcgcgggaaatgtaacgaggatttaccgctgcaacatgcatcgcgatgtcttttgcaagatcctcgtcagttgttccgctaagaacggataatacgccgatgcggcctcccatgtgaaggtaagcaccgaacgcttcgctgtcttcttttgaaataacagcaaaacggcgaagagtgattttctctccgattttagcaacgttgcttgtgatgtattcttcaacagtagaaccgttttccatcttttgacccattgcttcttcaagatcagcaggagcgtttgcaagaaggtggtcagcaagcgtgttcagaagctctttgaagccttcgtttttcgcaacgaaatcagtttcagagtttacttctaagataacgcctttgttgccgtcagttttaataagagtagaaccttcagcagcgatacggtcagcttttttagccgctttcgcaattcctttttctctcagaaggtcgattgctttgtccatatctccgtcagtttcagtcaatgcttttttacagtccatcataccagcgcctgttttttgacgcagttcttttacctgctgtgcagtaatagccatttgaattcctccttatatgtgtaaacaagatatgtatagatacatttttcttgaaaaaaggtgataaaaggcagtccctcttatcaccttttgattaggttacgcagttgtcgtttctgtttcaggtgcagtctcttcagcagcttccgcttcttcttcgccttgcttcgcttctaagatagcatctgccattttagaagtaagaagtttgacagcgcggattgcgtcatcgtttgcagggattacgacatcaatttcatcaggatcacagtttgtatctacgattccgatgataggaatgttcaatttgcgagcttccgcaacagcgatgcgctctttgcgaggatcgatgatgaataatgcatcaggaagatccttcatgtctttaattccgccgaggaatttttcaagacgctctaattcttttttcaattgaacaacttcttttttcggaagtacttcaaatgtaccgttttcttgcattttctcgatgtctttcagacgcttaatgcgtttttggattgtttcgaagtttgtcagtgtaccgcccaaccagcgttggttgacatagtacatgccagaacgtacagcttcttctttaacagaatcctgagcttgtttttttgtgccgacgaaaaggatttttccgccttcagcagcaaggtttttcgtgaagttgtaagcttcctctacttttttcactgttttttgaaggtcaatgatgtagattccgttacgctccgtgaaaatgtaacgcttcatttttgggttccagcggcgtgtttggtggccgaagtgaacaccagcttcaagcaattgtttcatagaaataactgacatgtgatttcctcctaataaaatggtttttttcctccgcttaggtcatttttgtgcagaactgccgtttgcagcaccctctgcataaatcgttaagcgtgtgtatttaacaccaagacataatataacacagctttatgcgacaatcaagaatcctttacagctttgccgcgaaattttaaaaacagctcgatttctgtctttccgctctgcatccgtttggcgatttccgcgggggtgagcccttgttcatataattctgaaacacgttcttcaaacgaatgcgcgcccctgttttcgtcactttcaacccgttccgttgcactgataagcttttccatgtggtccggaatatcaggctcttctttcggttccggccggggttcggcgtcttctgcgtccggcgcttgacggctttttgcgtcttcgagtctttcattttcttctttcagctcaagcagaaacgctgcaagggtgttttccgtctcttcaagaatcttcttctgctggcgctccgtctccttgagggctgaaaacctcgtgtacagaataatgacggcataaagcagtacgccgtgaagcacaaagcttaaaagccataatagtgttgacatgtttttcactcgctaaccatgagttcattattgaattactttttcaagcagatgctttaatttaaacagcgcctttgaatgaatctgtgaaatccgcgacgtcgaaaggttcaagacttgtccgatctcggtcaaagtcagttcttctttatagaataaactgacgacaagctgctctttttcagagagctcgtgaattttgcccgcaagctgagcgatcagctcgtccttcatgattttttcttccggcggcacatttttgtcatctctgatcatcacttgaatattctcaccgtcatcctggtcgtgaagcttttcatcaattgataagagattggcaaaaaacccttcattcatcgttgatactacgtcctgctccgtcatccccagctcttctgcgatctctgaaggagtcacattccgaaggtagcgctgttcaagtttttcgatcgccgcttcgactttttttgtcttctcccgtgaagttctgggcagccaatcttctttacgcagcccgtcaatgattgcaccgcgaattctaaacgaggcataggtatcaaattttaaatcccggccggggtcaaatttttccagggcatcatataaaccaagcataccaaggctcattagatcgtctttatgcaccgatttcggcagtccgacggaaattctgccgacatgatatgtgaccagcggcatgtaacggcgcattaaatcatcaccggctttaggatctttccactctttccagcgcgaccaaagcacctgatcttcataattcaaggattgcattgttatccccctacctcatacctttattaaatcgttgtttcaccttgtttaacagttcgaatgtgcagcatgcaggactttggctcaaattcaatcgtccggccgcttgagccgcccgtatcttcactgatgaccggaatgttatacaatgaaagctgctctttgatggccgctacattcctcggaccgattttcatcaggtcgtttgtcattttaaacttaaacatctccgctcccccggcgagttttgccttcagggcaaacttgcggcagccggctttcaaaagcatatcaatcgtcatcttaacggcggtgtccgcgtattttgcacggttgagctccgccgtttttgataaaccggagtccggcagcatgacgtgaacgagtcctgccgtttgtttgtctttatcgtataaaaccagccctacgcatgaaccgagtcccgaggtccggattttatccgggtaacgcgcgacttgaacatccgcaatccccactttaacgactgcggcttccgcacggctcataaagccgcacccaatgagacgaagagcttttcaaaagaatcatagtccgggagcataaacatgtgggctttgagctcttgccggctgccctggtcaaaaatagaagtatccacgacaatggcatgctctccgacttggctgagttccatcagcccttcactgataaccgcgccgaacatatcaagtgagatttccggcacgctcgggtaaatctcaagctttgtcaaatcagccaatgccgttaaataggaacctgctaaaatattgccgaactcatgtaaagcagaagaactcaaatgatcttcacccaactggtcaatatcaaaatccggatttccgatcagctctctgataaactgttccgcctgatggaaaggcatgatgagaaagatagagccggtcatgtcgccttccattcttaaaaagatactggcgaccggcgtttcagccccgccgaaaaaatcagcgagctcatcaaatgtcaataaagtcgcaaacggcacttccatgtctatctttctgttcagcagctgagccattgcagaagccgagtgacccgccccgatatttccgacttcccgcaaaatatccatctgctcttctttgatcgcttcaaacttactcatgttgtcttttcccctttaagcattaggctctccggacgcagatgccgaagcacctttatccagcaccgcatgcgcatcgataatattgaggagcctgttatcttgcttgacgatctgtttaatccacacatccgtttcctttgtctggctttcaggcgcggattcgatttcattttcatgcacggtgatgacgtcattggcctcatccacgacccatccgacatcagcgtcacggtaagaaatgatgataatccgagtctcttctgtgatgtcctgttcaggctgattcagacgttttcttaaatcaagaaccggggtaatcactccgcgcagattgataacgccgcggatataagattccacacccgggaccctcgtcggtttttgccacttttcaattgatttcacctgggaaactgagatagcgtattctttcccgtttatcataaacacaatcattttttcacctgttttgatttcagcagtcattcgggcacctcctcgtgtcgttttagtagatcagcgcattgcaatcaataatcagcgccacttctccgtttccgagaatcgtagcgccggaaatcgcaaagacgttcgtcaaatagtcgccgagtgatttcagtacgacttcctgctgtccgataaaagaatccacgacaaaagcagtggatttatcgccctttttcacgacgattacatggaactgatcggcatcctgttttgaatccgtaatgccgaattcttttttcagatagacgatcggaacgatttggcctctgaaatcaatcacttctctgtcatgcgtctgcaggatatctttcttatcaataacagccgtctctataatagaagaaatcggtatcgcaaacgtctcttcttccagtttaatgagaagaacggatataattgaaagtgtcagcggaagctggatactgaaaagagaaccttggccttccgcggatttgacactgacagagccgccgagtgattcgagtttattttttacgacatccaggccgacgccccgccctgaaatgtcagaaatttgatcggcagtcgagaagcccggagcaaaaataagctcgtaaatctcattatcttcaagcgtttcagcatcacgttcggtgattacactccgctcgagcgctttttcaagaattttctttctgttcaggccggccccgtcatcttcaacctcaataaagacgtggttgccgctgtgatatgccttaagcacgacatgacctgattccggttttcctttattcacccgcacttcaggcgattcaatgccgtgatcgatgctgtttctgattaaatgaacaagcggatcgccgatttcatcaatcaccgtgcggtccagctccgtttcagctccgatgatggacaattcgattttcttgtttaattccttttgaagctggcggatcattctcgggaaacggttaaagacggtttctaccggcaccatccgcatattaagaataatagactgaaggtcgcccgagattctggtcaggcgttcaacggtttcagtcagctcattgtggtcaagctctttggcgatctgctcaagacgtccgcggtcaatgacaagttcttcaaaaaggttcattgaagaatccagtctttcaatgttgacgcgaatcgttttcgagccgctgtgatgcttcggctgttcttccgttttcgcttgcggcttaggctgtttctcagcctttttaaccggagcttccttcaccggttcagccgcttgcggtttttcggccgtttttaacggcgcaccggcagaaatttcgacattctccacttctgaaatgccgctgatgagttctttaatttcttcagcaggctgctttgtcaagaaacacacctgaaaatccgttccgaaatcttccgtctcaagcacttccgcggcgggtatcgtttttgcgacttccccggcttcattcagcttttcaaatatcatgtacacgcgcacggctttgagcatgcagctttcattcagggaaaccgttatttcatagcggctgaatccttgctcttccgcctcttcaataacagtccgttcgaactcgtcataatcccattcagttgaagcctgttgttttgaagccggcggttctgctgtttcggctgaagccgcagtctcatgcaccgcatttacgtcgagcttcgcactcacttcagaaatatcacgtttgccgtctcctccgtcaataatggactgcaccatctcttcaagatgatcaagcgcttcaaacagcacatccagccaatctgatgtaacgggcatttctccgttgcggatggcgtccagcacattttccatcaggtgggttaaatgcgccagatctgtataccccatcgttgcgctcatgcctttcagcgtatgggcagctctgaagatgtcatgcacaagctgaaggtctgccggatctttttccaacagcagcagcttttcgttacatgtctgtaagtgctctttactttcatcaataaagacatctaaatattgattcatatccaattgattcacaccctctcttttttcacacatccggtaatggatgccgcgatatcttccacatgtttaatctcatgaatgaggcccgcctttatcgctgacttcggcattccgaacacaacacaggattcgtccgattccgcaatcgttttaacgctgcctgttctaagcatttcttttacgccctcggttccgtcgctgcccatgcctgtcataatgacggctaccttttcgtaatcggataagcggcttgccgaccgaaacaaataatcggctgacggtttatgccggctttccgtatcatgaacgtcaagaatgatgcggagccttccgccttcctctgcaaccgtcatattttttccgccgggcgcgatgtacacccatccgtctttcgcttcttcaccgttttccgcttctttgacctgaatatctgacaaatggttgagtctgtctgcaagtgaagcggtgaagccttcaggcatgtgctgaacgacaaatacaggcgcctttaaatccttcggcagtttcggaatcaccttttgcagagcccgcggtccgcctgtagaggtcgcgatgaatacggcctgcttggcggatcttactttcggtctttcaaatcccgccaaagccggacgttccgggatagaagactctttcactgccgcctcaggtttttgtgcgcgggacagcccggctgcaatcaccctctcaatcagctgctctttaattttataaagatcaagtgaaattgctccggaaggcttggtgataaaatcaaaagcgcccatttccaggcagttgatcgttcggtccttcccttgctgtgtctggctcgataccatgatgacgggaagtttatatatgctgatgatcttccgcaatgtatccgttccgttcatgaccggcatttcaatatcaagcgtgacaacatccggtttgagaagctctattttcttcagcgcctcttccccgtttctggctgtcccgatgacttctatctgcacttccgcagccagaaaatcggtaatcatctttctcataaaagctgagtcatcaacgacaagcacacgaatcactgtaaagtcctcctcaataaaaaagaagataatctctcaataaatgccggtttctcttctcttggtttgttttcttccgtttgaaacaagacatccgtcagaagacggacggacctgctggcttttgcttgaggactttttattaaaaaaggcacctggtcaatgacggcttgacttactaacgggtcatcgggtatggagccggcgaaacgcacctccgcgcctaaaaacatgtgaatcgcatgagaaaggcggttgtacgtgtccagcgcctgtttttgggcgcgggcgcgattgacggcaatgtttacggtcagccgttcatccgcgagcaagagatgtttgatcgcgctgtaggcatccataatggccgtcggctcaggcgttgtcacggcgagaatgtcttccgccgataaaataaacggcagctgttcttttgaaagtcccgctcccatatcaaacagaacgtaatcaaaatcgcttaatacagcggaaagaccattcataaaagccgaccacttctctccgtctgcttgatagatcgcctcaagccccgttcctccggatatgtagcgaaggcctttcggaccggaggacagtgattgcgccaatgcgtgccgattctccatcacatcaataatggtgcgggaagaagcagcgccgatcagcacatcaatgttgcccattccgatgtcaagatcaatgatgagtgctttttttcctttttcctgcagggcaactgccatgtttaatgttaaattagattttccgacgccgcctttaccgctgatgacggctaatgtcttcgcttttttctcataaagctccggcttgatcatttgccgctctctcattttccttcttaatgactctgcctgatcgggtttcatgtcaaaagcatccttacaaactcttttggtgaagccgataggatgtcttcaggcacatcctgtccatttgtcaaataggcggcgccgattcttgattccgacagcacttgaaacacggagccgagtgaggcggtttcatccgttttcgtgaaaatgaattgattgaccggcacacctgaaaactgtttcagcacctgtttcatatcttcatattttgcagatgcggataatacgagaaaggattgtaagcctgattcaaacggaatcatctcttgtaattccgtaatatactgctcttctttaaagtttctaccggctgtatcaatgaaaacatggtcatattcagcgaatttttccagtgccttcagacattcttcctttgaatagcatacttcaagaggagcctgaagcagctccgcatatgtcttcagctgctcgaccgcggcaatccggtaagtatccgtcgtcataaaggcaatttttttatgctctgtcagcattgatgaggccgcgagtttcgcaagtgtagtcgttttgccggccccggttgaaccgaaaagcacgacgtattttgattgaatcccttcctgccacctgtctgccgaagggagctttttcactaacaaatcctgcagttttgagctgacattatcttcagttaaatctccggaaacaattgaagaacggagcaattcactgagtacggcgttttgcgtatgatcaggaagcccggcttgcttcaatagtctctcggctttttttaatggttcagggagcacttctttaaaatgcgccagttcgccggaaatactttgatccggaagacgcggcggctgaacaggctcagctttctccgccgttttggtctttttcatttcttcagcggcagccggcggcgtttttctcgcttccctgacgtcacgatctaaaaccgctatcacttcgacggcctgctgcgaccgcagccccagccattttcttttctttacttgtttggaatgtaaaataacggcatcattgccgagttcctttttgatttgcttcgcggcatcctgcattgaagcggctgtaaatttttttattttcattaaatatccaccactccaatgctctgtacttcaacatttgcttccagctcattataagaaagaaccggaagatcagggaaataccgttctaacagctgttttacatacattctgacagcaggcgagcaaagaagaatcgccgactcctggcggatggaaagctgctcggcctctttagcgacagaacggatgatgctgtctgaaacctcagggtcgagtgacaggtaattgccctgttcagtctgctgtaccccgtctgcaatcgctttttccacccggcctgagcatgtgatgaccttcagcgtttcatgctctctcgcatattgtgccgtgatttgtttggcaagcgactgtctagcgtattctgtcaaaaggtctgaatctgtcgttaatcttccgtaatcggcaagagtttcaaaaatggtcaccaagtttctgattgaaactttttctctcagcaatttggcaagcaccttttgaatatcgccgacagaaagagggtttggcgtgacttcctcaacaagcacaggataattttccttcagatgatcgatcagctgcttggtttcctgtctgccgaccagttcatgggcgtgctgcttaattttttctgtaatatgcgtagatacgactgatgccggatcaacaactgtataccccagcatgtccgcttcatcttttgcagcttcgctgatccattttgcgggaagtccgaacgacggttcaatcgtttcaattccttcaatgacgtcatcttcaggcgtcggtgacatcgctaagtaatgatccagcaggagctctcctttagcgacttcattgcctttaattttcaatctgtattcattcggctggagcgcgatgttatctctgatgcgcacaaccggaatgacaagtcccaattcaagcgcaagctgacgtctgatcatgacgatgcggtcaagaagatcaccgccctgccccgcgtctgcaagcggcacgagtccgtatccgaactcaaattcaatcggatcaatatgtaaaagctgcacaacgctttccgggcttttcagttcatccgcctgagcctcttcttcaagaatttcttcctcttcttcgctcggcttatccgctttggacagcatgtaagcgccgaatgcaagcagaccggcgatcggccccgtcagcagaatgccgatcggtgtaagaagaccgagcaaaagtacagttcccgcggctacatacaagagcttcggataagcaaacagctggcctgtaatatcatgaccgaggtttccttcagatgccgctctcgtcacgacgatccccgtagccgttgaaatgagcaaggccggcatttgagaaacgataccgtcaccgaccgtcagcattgtaaagtgagacgcagcttcttgtatgctcatcccctgctgcagcatgccgattacgattccgaaaataatattgatcatcacgatgatgatacccgcgatggcatcccctttgacgaatttgctcgcaccgtccatggcgccgtaaaaatccgcttcccgggcgactttttcacgtctgtgctttgcatcctgctccgtaatcatgccggcatttaaatccgcgtcaatactcatttgctttccgggcatcgcatcgagcgtaaatctcgccgccacttccgatacccgctcggcgccttttgtaatgacgataaactgaataataatcaagataatgaagacaacaagccctaccagcacatttccgccgacaacgaaattcccgaatgtctcaacaacctttcccccttctccgtgagaaagaatcgaacgtgtcgtcgacacattgagcgaaagccgaaacagcgtcaataacagcagcaatgacgggaatatcgagaattgcagcggttcttgcatattcattgtggtgagaagcacgatcaacgcaagagagatattaatgatgatcaaaatacttaacaaccatggagggaatggaatcaccagcattgccacaatgaggacaacacttattaaaaccgataaatctcttgttgacatgctgtttttctctccttttgaatctgaaattcactatactttttgtttcgttttatatacataagccaaaatttccgcaatgactttgaaaaactcttccggcacggcctggtcaatgtcaacctgatcatataacgcacgcgcgagcggcctgttttcaatcgtcatgacatcgtgttctttggcgatctgcctgatttttaatgcgagatggtcgacccctttggcaacaatgtaaggagcgtccattttcttttcatcatattttaaagctatcgcataatgggtcgggttggtaatgatgacatccgctttcggtacttcctgcatcatccgcctcatcgccatttcccgctgcttctgcttaatcttggacttgataatcggatcaccctccgattttttgtattcatcttttatatcctgttttgacattctgatatttttctcataatcaaaacgctgatataagtaatcaagcccggccagcagcattaaagcccctgatcccgcaagccccatccaaagagtgagcttggaaacgaaagtgagcacttccgcaggagtcaaaagcggaaggcggagaatatcgccataatgcagccagagcaccataaaggcggcaaaaccgaccacagtaatcttcaaaatggatttgaccagttcaacaatcgccctcatgctgtaaatccgcttaaatcctttcagcgggctgagcttattcaagtcaggcttgaggacttccgcagaaaacagaaaacccacctgcatgtaattgctcacgacacccgccacaagcgcgaccagcataatcggcgcgagaatgaggctgatatctttcaccgtatccacgaacagttcatgcacggcagatgctgacagatgtaaagatatcgatttcgtataaaacgttttaataaaggacagcagcctgtcccgcatataaggaccgagcgcgatcagcgaaagaaagataatcagtaaagaaacggctgtattcacatccgtacttttcgcgacctgtcctttctttcttgtatccttccgttttttcggcgtggctttctccgttttttcaccggcaaagaattgcagattcagtctgagcctcatcatgtcacaccgaccaatgccaatagattccgcatggtttcaacggtaaggctgaagatgttgcggacaacgacaaacatcaccgccatacaaacgatcagcataataaagctcacggctattttcagaggaagcccgacaacgaaaacattcagctgcggcaccgttctcgccacgataccgagcgccaaatcaactaaaaacagactggccacaaccggcgcagacatttgaaaagcaataataaacatggcattgaagctttttgcgataaaaagtccaaagtgatcatttccaaacgacggaaatgcctgatcaagcgggatatactgaaagctgtaataaatcccgtccaataaaagataatgggcgtttatgctgagcataaataacagcgccagcgtataaacgaattgtccgatcagcgggctttgcgttcctgattgcggatcaatgacattggcgatggaaaagcccatctgaaaatcaataaaggaacctgctatctgaatggctgtcatcatcatgaaagcgatcagcccgaggctcaagcccacaacggcctcttttatgacaagcagcatatactgttcccctatttctatttccggcgcatgtttcagcgtgctgaagcagatcaccgaaagaaaaaaagcaaagccgattcggtgaaccgccggcagattccgatgtccgaacaccggcaccgttacaaaaaaagcagagattctgataaagaccaataaaaaagcgggaaataaatcaatgatggaattcatttgattctaccctgcaaatcggttcagatgagaaaacagatcagttgtgaacgaaagaatcgtcgacagcatccaaggaccgaaaaagatcagtccaagcatcaccgccacgattttcggaatgaacgcaagcgtctgttcctggatttgagttgtcgcttgaaagatactgacgagcaaaccgacaatcagcgcgatcgcaagcagcggcccgctgatcattagtgttacatatacggctttttccgccatggaaattacaaattctgaactcacaattagcacctaccctaaaagctgtcaagcaaagatttcacgattaaataccatccatcgaccaaaacgaaaagcaatattttaaagggcagagagatcataaccggcggtagcatcatcattcccattgacattaagacgctcgccacgaccatatcgataattaaaaacggaataaaaatcataaagcccatttgaaaagcggttttgagttctgatatcgcataagcgggcaccatcgtcgtcaaaggaatatcctgaatcgattcaggttttttcattttggcatagttcataaacagcgccagatccttctgccttgtatgcttgctcatatactctttaatcggcttctcggcttttgtatatgcttcatcgagactgattttattgtccatcagcggcgttaaggcttccttattaatctctgaaaaagtcggcgccataataaaaaacgtcaaaaacagcgcaaggccgattaaaacctggttgggaggcatgttctgcgtcgccagtgaggttcttacaaaagacaggacgatgacgattctcgtaaagcaggtcatcaaaatcagaatccccggcgctactgaaaagacagtcaaaagcagcagtaatttaacagtggagctgacttcggtcggactgcttgaattaaaaagattaataaattcattcatgatgataagggcctttcttctttccttcagaacggctttgtttcagctcgttcagctgttctttcagcgcttttgaaaacgacggaagcatcgtttgcggctttttttctccatccttacgccgatttacgagcttggtccattccacttttgaagacatcgactcttcgtattggctcagaatcgcctcgcgctctttttcatcttcaatttcttttaaaagctgtatcgtttcgcccacaccgactacgagaacactgtttcccactttaatcagctgcacggaacggttttggccgactgacgttccgccgatattttctacatattgaaacggcttcagcagacggtttcttctattcatcagtttgacaaatccatagatcagcagaatgacgaataataacgccccaatcatctttacaaaatcaaaagcggagacagaagatgcagaagcatcccctatctcttgatcagccgtttgtttcgatgtatcgctttttttctctgttttgtttgttgattgtttgtcaaaccattcgttgacggtggaattgtcagactccgccgcaaaagcagggaacggatgtacattgagtaaaacgaaacaacaaatcaaagctagtaaaccatgactctttttcaacagtcgtacaccctttagcttaatgttttattaatagcttcaagcacgcggtccgcttggaacggtttcacgataaagtcttttgcaccggcttgaatcgcgtcaataaccattgactgctggcccatagccgaacacatgatgattttcgcctgcggatcgatttgtttaatttcctttaaagctgtaatcccgtccatttcaggcattgtaatatccattgtcacaaggtcgggggaatgctctttgaatttttcgactgcctgcgctccgtctgaagcttcagctacaacgtcaaaaccgttcttcactaaaatatccttgatcatcattctcataaatgctgcatcgtctacaattaaaattctgtgtgccataatctgtttctctcctctatgttcgcttattttaaattgttaaggcggtctgcctgacttaaaatatcagtgactctcacgccgaagttttcttctatgacaacgacctcgccctttgctacgatccgctggttgaccaggatgtcaacaggttcaccagccagcttgtcaagctcaataatgcttcccgcagaaagttcaaggatttctttgacgcttctcttcgttctgccgagctcaaccgtaacggaaagcggaatatccatcagcatatcaaggttattccttgatccttgcgccgcttcgttatgatcaaatgcctggaattctaccggagcgacttgaacaggagcagctttttttgcggttccctgtctcttcggaagctcgggttttgcctgcggctccggctgcatggcaggttccggctgcggcgtttcgtatgtttcctgtggttctgatacggtttctgcggcctctgactcatgctggtctgcagtcatcaggtctgcgatcagatctttcgcaaacgtaatcggataaagctgcatgatgctcgaatcgattaattcgccgactttcagacggaatgacacttttacgagcaggtcatcctcaggtattctgtcggtccctttttcttccgtcacatccagaagttcaacccttggcggagaaatgtcaatctttttactgaacacggtcgacattgacgtagcagccgagcccatcatttgattcattgcttcctgcacggcgctcaggtggatttcaccgagtgacggatcggcgccccggccgtccccgccgatcatcaaatccgcgatgatggccgcgtcgctttgttcgacgacgagcaaattgctgccgtcaaagccttctgtgtagttcacttcaatggcaacatacggatgaggaaattcatcactgattttgctttttgaaatgacggtcacactcggcgtcgtaatgtccactttttgatttaaaagagtggacagcgccgtagccgagctgccgaacgaaatattcccgatttctccgatcgcatcgcgctcaagttcagacaagttcgccccttgaggctgttctgtatcctctgactgactgcttgtgccgttaagaagagcatcgatttcatcttgagataatctattgttcatcttgttcacctcttatgtcgtgatctaaaatttgcactgcctgtcttcgattcacccggccggcctgccctaaaaacttcggtttgtttccgaccaatacagtaagaggatcagtcactgatttgtccagagttatacagtccccgacttccaaacttaaaaattcttctattgtcagttcagaagcgcccaagagagccacaacgggaatttgagccgtcatgatgcgcttttcaagcaacttcgtttcttcgggcttcgcttcattccggtctgattgcatccaataatgtacggaaagcttagggataatcggctcaagtacgacatggggaatacaaagattaatgacaccgctgatttcacctatctgcgtattgagagaaatgacaacgactgtttcatttggggaaaccatctgtacaaactgaggattcacttcaaattcagtcatttcagggtcaatatcagcaatcgattgccacgcttctttgtagttgcccagtgcattttcaaataagttagaaataatattcgtttcaatttccgtaaggctgtcagctttgttatgagtgatgccgatgcctcccatgacgcggtcaagcattgcgtatgcgatggtgggattaacctccatcatgattctgccttccatcggatgaacatcgaataaatttaaaatcgtcatgttcggtatggaacggataaattcttcatacggcacctggtcaactgagctgacggatatatgaatatacgttctgagcttggcggaaaagtgtgttgtgagaagcctcgcaaagttatcatgtatccgggttaaactgcgtatctgatctttcgagaatctgagagcccgtttaaaatcatatacctttacttttttctctttaacttcctttttcagctcttccgcatccgcctcacccgtggaaatggcggaaagcagtgcgtctatttcattttgggagagaacttctcctgacattttcttcacctccgtattctgtcaaatttgtttttattgcagattaaaggaggtaatgtacactttctgaacttttccttcttggagatagctgtttactttctcttttaatgattgtttaaacgcttctcttcctttatctccctcaatctctccggcgcttgtgccggctaaaatggaaatgatgttgtctttcacctgaaaatcgcgtttttcaagttcttccttcgctttagccgagtcggtttcaagcttgatgccgatacggatgatgctgtcagactttaagtttgtcgtaatatcgtcgacagacacagtggctgcaacgacttcgtcaattgtcggctttttatctttgccggaatttccgctgacgacaaaatatgctgccgttccgaggccggcgatgacaattaaaataatcagcaaaatgatgactaattttttcttcattcttcttcctctattccctgatccagtgaaaatatttgtatactatggtaaaacgatatgacttttttgagaactgcttcttccggttctttcactacgaactttttgccgttggacagtgtaatcgtcgtgtcggggaagcactcaatctgttcgataaacagcgcgttcagcgtaaaaggctggccgtttaaacgggtgacttgaatcatgcaatccggagaagcggcctaaccgcctctcctccctccttaccgtttcagattaaccagctcctgaaggatttcatctgaagtcgtaatgatttttgagtttgattggaaaccgcgctgagcaacgatcatttcggtaaattcatctgtcagatctacgtttgacatttcaagatagcctgccaaaagcttacctgttccgttttcgcccggagtggtgactgcgcttgcagctcctgaacttaatgattctctgtaaaagttgcctccgattttttccagaccggcgctgttagggaacgtgaccagaccgatttgtccggcatcatgaacctcatcccctgcatcagtgtatgtaacggttccgtctgcaccgatgctgtaatctttcgcatcagtcggaatattgattttgccgccgccgattttttcaagatagtatccgtcagtcgtaacaaggttcccttgattgtcctttccgaaattccccgcacgtgtgtaaacaattcccgcacctgtattaatctgaaagtagccgtctccgtcaatggctaggtcggttttattctgtgtagcctgcggggcgccggttgaatgaacaacatcaatggaagaagtcgcggcacccaagccgatttgttttgaattggtcacgtttgaaccgccggcgactgtctggctgatcatatctttaaatgtaacgcggcttttcttaaatcccactgtgttgacgttggcgatgttattgccgattacatctagttttgtctgaaagtttttcatgccgctgataccggaatataatgaacgtaacatgttaaattccccctgagtttcttattatttagatgtttcgctgacggccgtgacattccacggactgacctctttgccattttcaagcacgagcacgtaattgccgtttgaatgcttgactgaattgactgggcttgtctgatccttcccgtcgctgtcgctgaatgtgacatttttgccgatccagttcacatacatcgtaaacggatcttgattttctacaaatttagtcatcgtcgtattcatattcatcatttgctccaatgaagaaaatgtcgccatctggctgataaattctttgtcatcaaccggattgagcgggtcctggttttgaacctgtgtcattaagatcttcagaaattcgtctttccctaaattcgtgctgctgtttactgcggcggtgctcttcgcgcttgaagtggttgaagcgcccgccgcggcataatccgagtttactgatgtcaactattcttcctccatttcattgagagaaagctcctccagcatatctccgaaatcgcctgactgctgctggttcttctgctctctctgtccctgatgctgctgtttattgtgatcggccgtctgcccgtaaacaggctgctgatccccgctttgaagcgggactgtaaaacggtcgacctggaccgacatattcggaagcgactgtttcagctgaggaagatgctgttccagcagctctttcgcggactggctggatgcgattattttgctttgaaacatcccgttttcgtttgtcaccttaattgtgacaaatccgaggttctcgggattaagacgaatcgtaaagcttccggttgttttcccgaaaggcgtgtatttcatctgtttccagccgctgatgacctgatccgttaacggtttattttctgccggctgctgttcagctcctgcggacgtttgctgaatgccggcaaggcttctcgttcccgaaaacagtatatgtgcagacaatttgctgtcaggcgcctttgcgtgagaaaccgtgccgccgttttgctgttctgtttttccggctgactcttgggatgattcagatgattgagataacacaaaagctttcagctcagtttcagccatatcccattcctttgttcccttttgagaaaggcccgcaagctgctccgcgacgctttgaaagctcttcagctcagcggctgtcatggagtaaagtttagatgcagattcgtttttcggaaaaaatgtctgccgcaggtcttgaatcacgcggtctgggacaccttgttttttcaatgcctctaataaacgggcgccttcctggtaaaccgcctttgcctgcgcgctgtcaggcagttcctgctgagatgtgaagagctgggatacggcttcttgaatgaaaagcagacccttctcaagcgcatccttgacggaatccccgtcttttgcgaaagaatccggctcatccgtttcaggcttcgccccatgctttttccccgctaacatgtcttcaacagattcggcaagctgtttcaataaaggaagagctgtttcagccgtctgctttccttcaagagcttttaccgcctcaagcagctgttttagctgcaattctttatcttccgggccggctttcagccaatcaccgattttcgatagggcatcattcagctcagcgtcacttgttttggtttcatctccgggctgccggggagaagtgatttccgacaggagccagttctgaaatagacctaagctgtttacattcatcttcacattgctgttttgtgcagcctgcgtacgattacccgttaattcaagcagcttcaacttacatcactccttatttccgtcagcggatagtttttctgtatatttagccgcttgttcaggagtcattttcgtcaagatttcagcaagctgctttttacttaatccgtttaaaatatcgagggcttctttttctttcagctttacgataatgcttgccgctttaccgctgtccatacttttatagatgttgatcattttatcttttccggctgaatccgcagcgtcttttttcgtttcatccgtcttcgttttctgctgctgttcagcttcctgtttcagtgaacggattttctgattcagattatcgatttcggacttgcttgtgtctaaatctttattcaaaatgttaatttcacttttttgttcctttatggtcttttcaagagaagccgttctgtcttccttctgcttttcccccgcgcttttcatttctttcgtttcgggaaccaattcttttaaaacaggcgttttagcggctgtttcctgaatcggcttcatcacatcaacgccggcagcccaaaggatgatgcttgcgacgatgatcagaaaaatcagcgggatcatgataaaaagcaggattgaaccgaactttccagatctcttttctttatcggccatttcattcgctcctaatgcccctgaatcataaactgcttgattgaaatgtcgtccatttccctcatctctgcagctttgtcttcaagtgcgaacatattaaattgtttttcccgcattttttcaaatttctttacttcaatgtttttttcggtgagctgttcctgcttctcattcatttcatttcgtttcatgatgacaagcttttgataatgatagatggtgttctcaagattggaaacgaattgctgataatgtctcatttcctgaacgctcatcccgcatttaagctttgattctttgtctttttcgagcaattcttttttgctcatattttcatatagtttttcagccactgtctcaaattcagaaaccgattgtctgtattcagtcaatgtttggtctttttcattttcttttaattccagcagcttttgaaatctgaattggtatgccacgatgtttattcctcttttcctgtcagactcgtcaatgccgcaatgctgtcttccaattgagcaggttcttccgttccttgttttaaaaattgaataagctgcggataaaactgaatcgcttcatcaatttctcttgatgatcctcttttgtaagctccgatattaatgagatcttcagagttttgataagttgacagaagatcgcggaatttgttggccgcctctatatgcgctgtgtctgaaatattagacatgaccctgctgatgcttttcaggatgttcacggccgggaactgccctttgttggcaagcgcccgatcgagaacgatatgcccgtctaatattccgcgcaccgtatcggcaatcggttcgttcatgtcatctccgtctacgagaaccgtataaaaagcggttatcgttccttgttcattcgcgcccgttctttccagcaaacggggcaaaatagcgaacacagaaggtgtatatccttttgttgtcggcggttctcccgctgccaggccgatttcccgctgagccatcgcgaccctcgtgacagagtccatcatgaacatcacattccggcctttatcgcggaagtactctgcaatggcggtggccgtatacgccgcttttaaacgcattaaggcaggctgatcagaggtcgcgactacgactatcgagcgtttcaggccttcttcacctaaatccttctcgatgaattcacgcacctcgcgcccccgttccccgacgagtgcgataatgtttaaatcagcttcagtctgcttcgcgatcattcccatcagggtgctttttccgactccgcttccggcaaaaatcccgattctctgcccttttcctaccgtcagcagactgtcaatcgatctgacgccgacacccatcttttcccgtatcggcgggcgtttcatcgggtttggcggcggctgttccgtcgaaacgggggacaaacctttcggaagcgcccggccgtcaagaggttcgccgaacgcgtcgacaacttgtccgattaaacccgcgcctactttgatgcggagcgactcgccagtggcctccacaatgctgcccggcgcgatgctggccgcttccagataaggcattaacagaatgttttcatcttggaagcctacaacctcagctttaatcgcttttctcgcatggcctttcggataaatgagacaaacatctccgattgagctttcgggcccttttgattcaatcatcagcccgatgacccgtttaaccttgccgtagcgcttgtacggatccgctatttcaattgagtctattaaatactgtgtcttcattgctccgctcccgcctcaagcgccgttaaaagtttttgctttaattgcatcagctgggtgtctatgcctgcatcaacacgtccgaacggagtttctatcgagcacgttcccttcgcggctttttcatcggcatataagcttaatctgcattctttgtataacagctgctgaatttcgtccatatgctgatgaaccgtctcataatattcagggtccacatagatggagatgtcatcataatcttttacttcggctactacctgtttgaccagcagaaggaaagcctctttatcatcacttttttgccgccatacttttttagcgagcgcaacggaaagctcaatgatttcttcctcagcgctttccagtttttcctcgactgactgtctcgccatttccataacggcattggcccggctgatgagattagcgtattcagcttgagcctcggcttttcccaatgccatgccttcttcatatccttctgcctttgcttcttctatcaatctttgtttttcttccgcccagcggtttttctcttcttcaatctgcagaagagtgtgctctaattgatttttcgcttcttcagacaccctgtcggcttcggccttggcaaaggccatgagagcctccggattttcgggttcctcccggtctggatgggaatgtgatttcctgacttcctgcaaggaaagcttgcgccgtttttgttcaggagaaaatggtgattgctgtttaatgatattagacaataatatcgtctcctccgcctcgcgcgattacaatttctccggcttcttccagcttgcggacgacgcccacgattcttgattgcgcctcttctacatcacgcaaacgcacaggccccataatttccatttcctctttaaacgtttcaaccatacgctgtgacatattgctgaagacgatctctttgacttcctcgctcgcaaccttcaatgaaagcaggaggtcgtcgttttcaacatctctgatcacgcgctgaatcgcacggttatcaagggtgacaatatcttcaaagacaaacatccgttttttgatttcatccgccaattcaggatcttggatttccaatgaatcaaggatcgttttttccgttcctctgtctacgccgtttaacacttcaacaacggcttctatgccgccggtctgcgtataatcctgcgtaaaggaggaggacagcttttgttcaaggacccgctccacttcatttatgatttcaggagacgttctgtccataaccgcaatccttcttgccacctcagcctgaacgtccgggttcagctcagacaaaatctgtccggcctgcaccgggtcaaggtaggataaaatcagcgccatcgtttgcggatgttcctgctgaatgaaatttaaaatctgttcgggctccgcttttctcgcgaaatcaaacggctttacctgcaaagaagaggtgagcctgtttaaaatgcttaccgctttgtcttctccgagcgctttttcaagcacttggcgggcgtaatttaaaccgccttgtgaaatatagtcctgagcgattgcgatattatgaaattcttcaatgatttcatcttttctttgatgatcgacgcttctgacccccgaaatctcgagtgtcaatctttcaatttcttcttcagacaaatgcttgtacacagaagctgatacatcaaggcctaaggaaatcatgaggatggctgctttttgttttcctgtaagcttgttctgatcacgtttcgccattttccactccccctaatcctcgtccagccagcttcgaagcaatttagcaaagtcttccggtttttctttagccattttttcaagctgttttcgtctgactgtttcttccgtttcaattttctcttcgttgatatcaggcaatcgaaccggctcgggcggtgtttcatattcatattcttcgtattcatcctcttgtgagcgtttctttctgatgaggagaataataagcagaataatggccgcaagcagtacgccgcctgtaatgtatacccagatcggaagacctgaagattgtgccgaatctgtgttcaggcttgtttttccgtcaaacggctgaacggatacaacgattttattgttgatatcattgtctgtcaggttttgattttgcgtttcgtttttatcaagagacgttctgacgaccgttcctaaaatcttctgtatatcagcctgtctctgtgctgataaggaagcggcatttttcggattaggcggctccaccatgacctgaatgcctaaatcacgcactttatacgggctttcagcgatttctttatgaatgcggttgacttcatagttgattttattgctgcttttttcgtagtccccgctgtttgaaccgccgtttgtctcggcatagttcgcggtgtcattgcttcccgttccggccgtgccgccgttggccgcgccgtcgcctttatacgtttccgcaactttttcgacgcttaccgctatgccttccatgttatctttatcgacaggttcgacagtgtcttcagtgcgtttttccttcgtgaagtcaacatccgccgtcacggaaacaacgaccttatcctgccccatcattgtgccgagcagtgactgaacatgtttttgaatgtccttttcgacctgcgacttaataccttgctgagaagcataactgtcagaaacggaccctgcaccgctgtcacttttgtcataatatgtagaattttgatccattatgacgatattatcttcttttaagttcggaacacttttagaaacgagatggtacagcccgttgatctggttttgatcaagcgagtagcccggtttcatctgcaaaacgattgaagcggacgctgccggctgatcttcaccgacgaacacggcttctttcggcatgttgatcatgaccttcgagcttttaataccgtccatttcatttatcaggtttgacaattcggtctgagtcgcctcaacctttaaaacgtcaaactcattatccgtcaggccgaagcccgcattttgtccgaaaaacgaataatcaattgatcccgttttcggcaggccttccgcggcaagctggactttaagcgcatccacttggctctcaggaaccttaatgaccgtgccgccgtcagcaagttcagaagacacctttttcgtatcgagctcttctttaatcttccccgcttcttccgcggacaaatctttataaagaggcaccatcttttcagacgaagtaaaaataataacgacgatgagtaaaataatgaatgcggccaagccgcttaccatgagtatcttctgtgtttttgatctgttgttccaaaacgctgccgttttggttttcatttgcattagagtacgattcatgttaacccccggtcattccagtcattctcttcaatctgaccactacatctgcattctcatgatttcctgataggcttccacggctttattgcggaattcggtagcggccgtcagagaaatatttgctttttgggcagcgatcatgacctcgtcaaggtttacatcctttcctgcagccagttcgttcgttatttggtcagatttcacttgtgactcatttaacgaatcaatagagttttttaaaagctccgaaaagcttgtttggtttgaagaatcagttttttgagtttggtttaattgattcgttacgttttgagtattttgggtttgttgaagctgaaaaggagtaatagcgttaaccacttacatcaccttactttccgatttctaacgccttcaaaagcatgcctttggaggcgtttaatgcagttacgtttgcttcgtatgatctcgagctgctgacaagatccaccatttcctttaatggatctacatttggtttttgtacatatccgtctttattcgcatcaggattctccggatcataaacgagattaaaagcggacgggtcttccgtaacaccagatacctttacgccacttcccgcgcttcctgttccgttcatcttggaatgtaaaagggacgaaaatgattcgcctccggattggagagataccagctttcttctgtaaggcacccattcgccatttacctgcttcgctctcgttgtatccatattggccaggttggacgatacgacgtccatccggacacgctgtgcagttaaagcggaacccgaaatatttaagctttgaaagccactcattattttcctcctgtcaagacggttttcagagaattgaatttgccgctcattctttcaaccaaagcctgataattaatttggttttcggctaaatctgtcatttctttgtcgatatcgacattgtttccgttttgctggtacgatgtatcactgctggacacgatagaataatcgtcccccgaacccgtaaagtcaacgtgccgatagtcggtttttacagcctcaagattggatgtttcctgatctaacaaatttcggaaagagactttttttgccttatagttcggtgtatctatattggcgatattattagttaagactttttgcttaatgtccgctctccccaaggcattctcaagattttgtatagttccagaaaataagtccaaatccacttacctccatttcagatatttttctcctaaaaatccttgtcgagaattgtaaaaccatatgcttattgtaagaaataacaggcttaaagtctatgaagttaggctaaaaaaaagtgctcaattatatctattttgcatgtaggtattaagtcctagaatatttgtactacaaggatttgtttaatataagactgaaaatagcagaatttctgtttcttcctccttttttcacacagcaagatggattatctcagatcagattccaataagcaactttaaactgcaacttttcacctattgtccataaaaaaagcagaacccccatttttagggatcctgcttttgtcttaatgagatttaaggttttccaattcaataaggaatttgttgttcagaactttaatgtacgtccccttcattcccagtgatctggattcaatgacgcctgcgctttccagctttctcagcgcgttaacgattactgaacgcgtaatgccgacacggtccgcaatcttacttgccacaagcaagccttcgtttccgtcaagctcttcaaagatatgctcaatcgcttcaagttcactgtaagacagagaactgatcgccatttgaacaaccgctttgcttcgcgcctcttcttcgatttcttccgctttttctcttaaaatctccattcctacaacggttgctccgtattcagcaagaatgagatcatcatcttcaaattgatcctgcagacgggacagaatgagcgtgcccagtctctctcctccgccgatgatcggcacgatcgttgttaagcccgcttggaacaggtctctgttttctacaggaaacgccgtgtattcgctgttgatatcaaggtttgaagacgtctccggaacattgaacagatttctcgtgtactcttccgggaactggcggtcttcaagcatttttttcatgcggtcattttcaatctgctgattaatagagtagcccaaaagctttcctctgcggctgacgacgaaaatattagaatcaatgacgtcacgaagcgtttcagccatttctttaaagtttacgggtttgcctgccgcagcctgcagcatgctgttaataattcgtgttttttgtagtaaagccatgataaataatcctcctagaattcctcttattaaattttcacaatataaattgacttagatctttgttgtttgcaatcgttccgagcttttcttcaacgtattgcggcgtgatggcgactttttccatcgtaacgtccggcgcttcaaacgacaggtcttccaagagacgttccaatatcgtgtgaagccttctcgctccgatgttgtccgtatcctgattcacatgataagccacttcggcgatcttacgaatagcttcgtcagaaaattcaagagatataccttctgtctgcaataaagcctgatattgttttaacagcgcgttatcgggttcgacgagaattttcacaaaatcatctaccgtcagcttgctcaattctacacgaatcggaaagcggccctgcagctccggaatcaggtcagacggtttggccatatggaatgccccggctgcgataaacagcacgtgatctgttttgacggagccgtatttcgtgacgacggtagatccttcgacaatcggaaggatatctctttgaacgccttctctcgatacatctgctgaggaagaagcccctccgttttttgcgattttatctatttcgtcaataaagataatgccgccctcttcagctcttaacacggcctcttggccgacttcatccatatcgattaatttgcctgcctcttcattggtcagaaccttccttgcttctctgaccgtcattttgcggcgttttttcttttttggcaccagattgctcagcgcatcctgcatattcatgcccatctgctccatcccggagccttgcagcatgtcaaacatcgacggctgctgctcttccacctctacggagacgtaatggtcttcgagctctcccaatgcgagctgatgcgccatgcgctttcttttctcttcaaggcttgcttcttcctgctggtcggcttcatcatcatttgccgcctggcttcctccgaaaagcatttcaaacggatttttcacacccgcttgttttttctttcccggaacgagaagccgcactatacgtttgtttgcattttcttcagcctgttctttcacttcgctgattttttcttctttaatgagccgcacggatgtctcaacgaggtctctgaccattgattcgacatctctgcctacatagccgacttctgtaaattttgtcgcttcaatttttataaatggcgcaccggtaagcttggcgatccgtctggcgatctctgttttccccaccccggtcgggcccatcatcaggatgtttttgggaacgatctcgtctctcagtttttcatcaagaagacttctgcgatagcggtttcttaatgccacggcgacagcttttttcgcatcctgctgtcctacaatgtattgatccaaccgatctacgatttgtctcggtgttaacggtttgttttccatgcgcctcaagtcctttctattcaagttcttccaaaatgatctgatcgtttgtgtacacacaaatctcgcccgcgattttcaaagcggcttttgcaatatctttggcggacagattctctccggcataggttttcagcgctcttcctgctgacagggcgtagtttccgccggagccgattgccaaaatgccgtcatccggctcaatcacttcacctgttcccgatacgagaagcaaggtatcctggttcatgacaatcagcatggcttccagcttgcgcagcactttatcgctgcgccattctttcgcaagctcaaccgacgcacgttttaaattgccgttgtattcttcaagcttcgcctcaaacatttcaaaaagtgtgaaagcgtctgcaacagatcccgcaaatccggccagaacctttccgttaaacagctttctcacttttctcgcggtatgtttcatgactacagcctgaccgaatgtgacctggccgtctcctgacatagcgcttttcccgttatgctggacggcaaaaatcgttgtcgcatgaaaagatgacatgagaagggcctccttttaattttctttaaaagctctcgggtggtgggacatatatgtgtttctcagcatttccttcgatacatgtgtgtatatctgcgtagaagacagattggaatggcccaaaagctcctggacgcttcttaaatcaaccccttcattcagcagatgagtcgcaaacgtgtgccgaagcatatgcgggtgtatatgtaaagtgccagatgctttttttacaagcccgcttaaaatatacctgattcctctggcggtcagcgggccgcctctttgattgacaaacagcacatcatgaggctcttttgctttttcaagcaggcactgccttccgctgttgatatacagctccagcgcatcacgggcatatgagccgaacgggatatagcgctgcttcttgcctttcccgtgaacgagcaccgtatccatgaacaggtcaagatcgccgacagtgagcgtacagcactcactgaccctcattccggtcgcataaagaagctcaagcagggcctgatcgcgcatccctgacggctgacttctgtctgaaacagcgaatagttcctcaagttctttttcataaagaaacttcggaatccgtttctcttgtttcggcagatgaacaagctgaaacggattctcttcaacaagcttttccctcattaaaaatttatagaagcttctcaaagctgaaattttcttgctgattgtttttcttgacaggcctttttcataagcctccgtcaaaaatattctcacatcatgatatgcagcttctttcattccatttatattttgagcatgcagaaacatcccaaattcttcaatcgaattaacataattcacaatagtatattgtgaataatttttttcaatttgtaaatattcaacgaataactttaaaaaaaagttaacattctcagtcattatgaagacctccctctccgaagggcttttaaatggtatcatataatgcatcgaagttgcaatgaaaagctatatcgttttcgaaatagtttgaatagtctcaattgcgcgtttagcgtattcttcatttcgttcttttttgtttttaatttttacaggcaattcttttaagaggccgaagtttgcattcatcggctggaagttcttctgatttgtcgtcgtaatgtagtgagccatgcttccgatcgccgtctcctgcgggaatgtcacaagatcctgaccgagcacaagtttggcggcattgattcccgctacaagacctgaagcggcagattcaacataaccctctacgccggtcatttggcccgcgaaaaacagatcgttccgctgtttaaattgatatgtcgggttcaaaaggctcggcgagttgataaatgtgtttctgtgcatgacgccgtatctgacgatatcaacattttcaagaccggggatcagtttaagcacttctttttggtctccccattttaaatgtgtctgaaaacctacaatattataaagcgttcccgccgcatcatcctgtctgagctgaacgactgcataagggcgcttgcctgttttcggatcttccagtccgaccggtttcatcggtccgaacagcattgttttcttgcctcttttcgccatgacttcaatcggcatgcagccttcaaagaagatttctttctcgaattcttttaaaggtaccgtctcagccgtcgtcaatgcttcatagaaacggtcgaactcttcctctgtcatcgggcagtttaagtacgccgcttctcccttgtcataacgggattttaagtacactttctccatatcgaggctgtctttttcgacaatcggcgccgccgcgtcataaaaatacagatactcttctcccgtgagctctttcagctgctgagaaagcgattctgacgtaagcggtccggtggcgataacagtcgggccttccggaatctctgttacttcctcagtaagaaccgttacgttcggatggtttttcacgagatccgtcacgctttgcgcaaattcatgacggtcaacggcaagcgctcccccggccggaaccgagcatttatcagcagattgaatgattgccgagtcaagggcccgcatttcttcttttaatacgcctaccgcattggcgagtgtatttgaacggagggagttgctgcataccagttcggcgaatttatcagtatgatgggctgccgtctgcctgacgggccgcatttcatatagtttcacttgaattcctcgttttgcaagctgccatgccgcttcacttccggcaaggcctgctccgattacattaactgtttgctggttcatttcttttcatctcctgttgtttgtcccttccacacaaagaaggtgagcaaggctctgctcaccgctacttctgtggttcttccttataatcgcattcgacgcattggacttgtatgccttttttaagctttttctctacgagcatattttcacatttcgggcattttcgttcaatcggtttgtcccaagatacgaagtcgcattcaggataacggtcacagccgtaaaagatgcgtttcttttttgattttcgttcgacaatgtttccttcatggcacttagggcattttacgccgatttgtttgacaatcggttttgtattccggcagtcagggaaattggagcacgccataaatttgccgtatcggcccattttataaaccatccgggagccgcataactcacaatcttcatcggcgtattcaggttcaatttccacttctttcatttcggcttccgcttttttcacgcgtttttcgaaatcagtatagaagctgtcaatgatttgaacccattctgtctggccatcttcaacatggtcaaggtctctttccattttagccgtgaattcaacgttaatgatttccgggaaaaactccatgataagatccagcacgatctgcccaagctcagtcggcacaaaccgtttattgtctaatcccacgtaaccgcggcgctggatggtgtcaagagtcggcgcatatgtcgaaggacggccgatccccagttcttcaagcgttttaaccaggcgcgcctctgtataacgcggaggcggctgagtaaagtgctgctcaggctcaatatctttcgataaaaccgtgtctccctctttaaggtccggaagcatgcggtctttttcttccagctgatcgtctttaccctctacatagactttcatgaagccggcgaatttgactttacttccgtttgcccggaatgtcaatccgttattgctgagatcgacgctcatcgtatcaaggacggcaggggccatctggcttgcaacaaagcgctcccaaatcagcttgtataatctgagctggtctcttccaagcaccgcttttaagtcggcaggttttctgagcaccgaagtcgggcggatcgcttcgtgggcatcttgtgcgttttcatttttctttgccggtttccgttttcccgctaagtactcttttccgtacgcctgatcaataaaagctgacgcttcttcaacggctgtattggaaatccgcgttgagtccgttctcatatacgtgatgagcccgactgtcccttctttgccgagatcaattccttcatataattgctgcgcgatcatcatcgttttcttcgctctgaaattcagctttcttgcagcctcctgctgcagagtggacgttgtaaacggcagagcgggatttcgtttgcgctcttttttcgtaaccttgtcaactgtatacttattgcctttcagctgagcaaggatggcttttacgtcttcttcgctttttaaaggaagctttttgccgttttttccgaaaaatccggcttcaaacgtctcttttccttttaaaaatgagccggtaatcgtccagtactcttcaggtttaaaatcgttgatttccttttcccggtcgatgatcagccggagcgcaacggattgcacacggcccgcactgaggcctttttttacttttttccaaagaatcgggctgattttgtatccgacgagtctgtctagtatgcggcgcgcctgctgcgcatcgacaagatccatattaatcatgcgcggatgtttaaatgattctttaatggcgtctttcgttatttcattaaagacgacccggcagtccgagctgagatccagatcaagactgtgtgcgagatgccatgcaatcgcttccccttctctgtcggggtcggccgcgagatagactttttttgctttctttgccgctgtttttaattcttttaaaacagggccttttccgcggatcgtaatatatttcggttcaaagttctgttcgatgtcaactcccatttgacttttcggaagatcccggacatgtcccattgaagctttgactttatatttcttccctagataacgttcaatcgttttcgcctttgccggcgattccacgatgactagataatcagacattttcatccccctcaagaggtgttctctctcttttcaagtatcaattcattttagagctgcctttttatggctttcaacatttcattctttatgatgaacgtcattttatacatgaaaataatgtgcaactttaaatcctcactattattaaatattacaataccgtttgtcaaacgatatttcaaaagggttccgtatactgaacgcatcgggcggtcagctctccgtcaatatcctctgcgcataatacagctttcgccccttcttgaatgagttttataggtcctccggaatatggattaaatatggaacccggaacggcaaatacctctctgccttgatcgagagcctggtaagctgtgattaatgaaccgcttttttcttttccctgcacgaccacaattccttcacttaatccgctgattatgcggtttctcatcggaaagtgccattttttcggctttgtttcaggaggatgttctgagagtaggagatggtgttcagccatgtattctgctaacaggagattttcccggggatagatgtgatggaatccgccggctatcacgccgatcgtaagcccttttgccctgatgctcgccttatgagacaatccgtctataccggatgcaagcccgcttacaatgacccagcctttttttgagagttcggcggaaagatgcccaaccgcttttattccgtcttccgtcggtttccgcgttcctacaatcccgatttttctgcctttttcaagaagcagcgtgttcccttttgcatacaagacagccggcggatcataaatcgctttaagccatgttggatagcggcttgatgaaatcggaatgacagtaatgccttcgcggcggtaatcggacagaacttcatcaagttccggatccttgcgctctatttcctgaaaaattgcttccggggctgttttcccttctgataaaacagttaatggatgcggatccggtaaaaaagacagagaatgatcagctttccaccattttaatagaagagacggggaaatgatttgattaatactgcagaccattaaacagcgcgatgcttgatccaaatctggaaacctcctctttttttcagcaaaaacaggaacagccgttacggctgcccctgcttcgatcagtgcgttttgcacgtttcaaataagcctttttcttttaacaccttaatcagcgtttcacccattacagaaggggtttccgcgacttcaattccgcaggcgttcatcgttttgactttttcttctgccgtgccttttcctccggagatgatggcgcccgcatggcccatgcgttttcccggaggcgcggttttaccgccgataaagccgacaacaggcttcgtcatgttcgctttcacccactcagccgcttcttcttcagctgtgccgccgatttctccgatcatgatgacagcatgtgtttcaggatcttcattgaacgcttttaacacgtcaataaagttcgtgccgttgaccggatcgccgccgatccctacagcggtagattggcctacgccggcttctgaaagctgatggacggcctcgtatgtcaatgttcctgaacgggacacaacgcctacatgaccctttttatgaatgtatcccggcataatgccgatcttgcattcttcaggtgtaataacaccagggcagttcggccctattaatctcgttttcttgccttccataaaacgcttcactttcaccatgtccaaaaccggaatgtgctcagtgatacaaatgacaagatcaatttccgcgtcaaccgcttccataattgcgtccgccgcaaacggagccggcacgtaaataactgacgcatctgcgcccgttgtatgaaccgcttctgcgaccgtattgaataccggtacgccttccgcttccgttccgccttttccaggtgttacaccgccaacgatattcgtgccgtattccagcatctgctttgtatgaaataaagcggtagaacctgtaatcccctgtacaataactcttgtatctttattgataaaaacactcattatctggtcccctgcctttcattctttcctaaactaaggatacgattttctgtgcgccgtctgccattgattccgcagatgtgatgtttaagcctgattcattcaggattttctttcctaaatctacgtttgtcccttcaaggcgcacgaccagcggcaatgtcaagccgacttgtctcgtggcttcaacaacgccctcggcgatgacatcgcacttcatgatgcctccgaaaatattgacgaaaattccttttacgttttgatcggaaagaatgattttaaaagcttccgtaactttttctgcggttgcgccgcccccgacatcaaggaagtttgcaggttctccgccgtagtgtttaatgatatccattgtagacattgcaagacccgcgccgtttaccatacagccgatatttccatcaagggaaatgtagcttaaatcgtattttgacgcttcgatttctttcggatcttcttcatctaaatctctgtattccataatgtctttttgtctgtataacgcattgctgtcgaagttcagcttagcatccagcgccatgacgtttccgtcccccgtaacgacgagagggttgatctcggcgatggagcagtccttttcaacaaatgctttgtataaaccgagcataaatttagcggctttgccgacaagctctttcgggatgttaattgcgaatgcaatttcccttgcctgatagccctgaaggccgacagccggatcaattaccgcttttttaattttttcaggagttttttccgctacttcttcaatctccgttccgccttcttcagacgccattaaaacgattcttgaagtagcgcggtcaagtacaagcccgacatagtattcctttttaatatcgcagccttcttcaataagtaagcgttttattacttgtccgtccggacccgtttgatgtgtgacgagcgtcttacctaacagttcttcggcatactctttcacttcatcttttgtttttgcaatctttaccccaccagctttgccgcggccgccagcatggatttgcgcctttacgacataaaccgagcttgacaggctctctgctttttcaactgcttcctctgctgtaaaagccactttaccttcaggaacagacaccccgtattttctgaggacttcttttccctggtactcatggatattcatttcccatcctcctaacttatgtagcaaaactaaaaatagactgcgctttcattctatataatactggaagaattgtctagggttcaaaacaaaatctttatatccttccaaacattctaacttttattttattgaaaatataaatttaaacggagtccgggaaatgaatggtccttatttttcgtttttcagggtttcgtccagtttgtaaacaaatgaaaaaatttcggcaacggtttcataaagcgcctccggtatctgatcgtcaaccgtcaaatggcgcattaattcgacaagggttctgtcttcctgaatgggaaccccagccttctcagcttcttttataatattttccgccacgtgccccctgcctgttgcgacaacctttggggcttggtctttctgccggtcgtaatgcagggcgacagctcttcttaacggcgtttgctctttcatattttcacatccacttttcttccgccgtctttttctataaactcttccacaagagcgctctggtctttcgggcgccgttttttagccgtgacgcctgacaggctgaagcccgtttcttttacagctttttttaaagccggtacgagagggtcgatggccgcctgaagctcaaaatcagtctcaaccgtaatggtcattacattttgctgaatcatgcagtccacaacggtttcttgcagtgtttcaaggtgcagcaaaaacaggagcctgcaatgtgacggatcgagttttccgtccggcttcttccgtcctttaaagagaactgtgatgtcattctcatacgcggacgctcccagcggaaatgacagcaccatctgcgtaacagaaggattatgctgctcaataaacagctggccgtttaatttatgaataagcggttccgcctcttgtttaacggattggggcgcctcttgaagcgtccggacggcttggagggctgttttcagtgcttgtttctccggctgcggagatacgcctttttcaagcgctgtaatgaatgataattcatcacgcgtgcccagtccttttttgattttctgcaaaaggcttaatacatcatgtttttctgcatatttcaattcggtgagctgagcggctttttcaaaaacagccgcctcctgttctgtcagatgtgcgttttgaagaacaggtgctgttttaaatgttttttcttgagaaatgaaagccttaatgatctccgccgttacttttacgggacggttttcagttttttctgccgatgtcattaatttctctataatctgttttgccgttttttcaggcagttccgtatctgtccgtgcactcggaggagaaggttggcttgagactgcctttccgttttcacgagtctctcggacaaatggtgattgttttgattccgtccgttctccttcatccatcagcccggtttctgagagcggcatgcgtgcagcctcggcaagcttcttcaagagacgttctgcatgaagatccgtttccgcgtttaacacgtcagaaatcgcctctttgagcacagacagctcttttgccgattgcggagcctgattgattgcctgaagcagtcctgagaggaggcgccgggtcggaaccggatatttaacggcatgaatggctgacaagacttccggatgtgcgggcagttcccgtttcagcgcaaatacgattgtttccgccgcttttttcaattcggcggccggaagcgattcagcccagcggatgcaagctttgaggctgttttccgtcatcggcagcttctgctgcataaacgtttcggcaatctgcagagacacagggcctggtttgacggaaagagcgtttaacagtcttcccgccgcttcctgaacggttttcgggtttccttcgaattggtcgatgacatgaagccggcccgttttttccgccggctgtttgtcataagaaaaccagtaatacgcctgcggacgaagggcggtttcaagttttccctgcatcgtccggccgccgatttggataagagcgctttgatcgtccagcaaacggagaaccttccctaacagcagcctttgagcgccgctgtctttaccgccgtcttgccggtccggagggatttccgccgtcagctgtctgaaagccgcttggatttcgccgcttatgttcatgtcttaagcctcttttctaacaataagattgaacgggagcgaacgtttttcggtgaatagttgtcggtccgtatgcctgaagagcttcaagatgttctttcgttccgtagcctttatttttttcaaagccgtacatggggtaggttttggcgtactcagccatgagacggtcccgcgttacttttgctatgcaggctccggcggcaattgacacgcttttggcatccccttttataactgatgactgcggaatgtcaagcggcagggtcatggcatcaacaagcagataatcaggtgtttccgttaaagcattgacggcttttaccatcgccagtctcgcggcctcataaatgttgatccggtcaatgacgtccgcatggacaatgccgactcctacagccgccgcttcttccgtgatccggctgtaatactcctcgagcttcttttccgacaatttcttcgagtccgtgagaccgagaatctcgcattctgccggcaaaatgacggcgccggcgacaaccggtccggcaagcggccctcttccggcttcgtcaacacccgcaatcaggcggaagccctttttggatgacagtctttcgtatgccgtcatgttcagccattgctctttaagagctttttccttcgcgtgctttttcagccattgctctaaaagcgtctgtacgctttttctcgggtctttctcacattgggcaaggaaggggtcgctttcgtccctgacctcttgcaggcgttcttttacgctttttacggttaatgtattcacgttctcttctcccttacattatgtatatcggtattctgcggaaaaaataaagacccgcatcgctgcgcgtctttattctgatggtgtttcaaatgaaagcctgccgaatttttccgtccggatgtcccgaatgatgacttccgttgttttatcatagtcaaccattcctccgcccatcaaacagccgcgtttttcaccgatcgcgtcgaaaagagcggcgatatcctcagggatttcctgaagtccgtagcgctccttcaagcggtcgggataatgctcttccagaaagcgcagcccgaagacggccacatcctgcaggttgataatcgtatctttaatcgccccggtgatcgccaggcgcaagccgacaagctcatcttcaaatttaggccataaaattcccggtgtatcgagcagctctaattccttgcctacctttacccactgctgtgaagtggtaatgccgggcctatctcccgtcttggcaatgttttttttggccagccggttaatgagcgtagacttgccgacattcggaatgccgatgattaatgcgcggattgctctcggcctaatgccctttgctttcattttatcgaacttatctttcagcagctcttttgaggacggcacgatttgatgcagtccctgcccgttaacggagtttattgaaagagagggaatgccctgttcctgaaagtggtccttccactgggcagtcacagccgcatccgccttatcggctttatttaaaagcataatgcgcggcttattttttaaaatctcctcaatcatcggatttctcgatgacatcgggattctcgcatccaccaattcgtatacgatatcaattaatttcagtttttctgttacttcccgtctcgctttagccatatggcctgggaaccattgaatggtcatgtgacttcgacacctgccttatttaccggaaccggatgttccgatgatctcttatgtattttacgttgcttgttctgcttttacaaatttcatataaaaaaagagcctgttacgggtaacaagctcttttcgttcgttatcattatcgtctgatttctttaatacgagccgcttttccgcgaagttcacgcaggtagtaaagcttagcgcgacgtactttaccgtaacgtacaacttcgattttcgcgatttttggtgtgtgtacagggaatgtacgttcaacgccaacaccgtaagaaatcttacgaactgtgaacgtttcgctgattccaccaccacgacgcttgatcacaacaccttcgaagatctggatacgctcacggttaccctcaacaacttttacgtgtacacgtaaagtgtcaccaggacggaacgcaggaagatcagtgcgaagctgttcttttgtgatatcttgaattagtttttgcatcgttttcaactccttccaacagatgctcttggccacaactgcaaggcacagcggaacatcgttttcaagcttctgaaggataagcctccttaagccacaagtagtatcttatcatatcttcatcgcctgcgcaatagaatctattcgttttcccactcggaaatccattttctttgctcatcagtgagaggatagttttcaagaagatcgggacgtcttaaaaaggttcttctgattgattctttatttcgccatttttgtattttagcatggttgcccgacagaagggtctcaggcacttttaagcctctataatctgcaggcctcgtatagtgcggatgctctaaaagccccgtgctgaaggaatcctccacgtgggatgcttcttttccgaggacgcccggcaaaagcctgacaacgctgtcggcgatcatcatggcagggagctctcccccggtcagcacaaaatccccgatggagatttcatcagtgacaagatgttcccggatccgttcatcatacccttcataatgtccgcaaataaacatgagatgttcctcttgtgccagctcctcggctttcttctgcgtataacgctcaccttgcgggcagacgagaataatgcgcggcttggcgtccgtaccggctgtcagcttttcaaccgcatcaaatacgggctgcggctttaacaccatcccggctcccccgccgtacgggtaatcatcaaccgtttggtgtttattatccgaaaaagcccggaaattgatgacgtcaaaacggacagcctctttttcctgtgctttttgcagaatggaggagccgagcaccccttgaaacatttcgggaaacagtgttaaaaagtcgattttcattcgtctattaacccttccattacatgaatcttaattttcttctcatttatattaatatcctttaccacagaagcaatatacggaatgagcgaatcttttttgccttttcttgcaaccacccatacgtcattagcccctggcgtcaagatttccttcactgtgccgatcagttccccgtcttctgacacaacctcgcagccgatgatttcatgaaaataaaattcatcttcttcaagctctcccaagtcttcttcagggactttgatcaccatgtttcttaggtgttcgacttcattgagactcggcatttctttgaattgcagcaggtgaaactgcttgtgaagcctgtgggcgctgaccgttactttgattggctccgcagccccttccgcaaacaaatagagcgtattgccgggcttgtaccgttcttcggcaaagtccgttttagaaatgacccgcacttcgcctttaatgccgtgggtatttacaattttgcctacattaaaccatctgtttgtcatattatcacctcgggcggatttcaattactaccccgtcttttatgacgatggtatttgccgctgttttttcatgccagttatcaccgacgttgattgaaagcagcgcatcgatctccttttccttcacttcgcttccaagcgggagcgactctgtctggcttatttggaaatcgatcattttgattttgtcttgtcttttctcaatggcttttttaaaagattccgctacatcgggattctgctgatctttttcatgttttctaagctgaaaatagagctggctgcattctcgttcaagcgtttgctttttttctgcaaaagaggccaaaagcttttccttgctttgctcggtcagaacctgcataacggttactctgtgaataatctgcataggaccagactccccactcttccaacatatttctgttcatttgccttttttacgtgtaaaaaaaggggaggtgccggccctctccctttttcagtcaaatatttcaaattgaactttcttagaagactgtgcgccagctgcaaaaacgacggttcgaatcgctcttgcagtccggccttgctttccgataatcttaccggtatctgacttattgacagataagcgcagcgcaatcttttgatcagtctcttcctttgtgaccgttatgtcttccggatggtcgacaagcggagccacaatgctgacaatcaaatcttccaagttctgatcagtcattacttgccttgtttagcgttgtggaatttttccataattccttggcttgagaacaagttgcggactgtatcagaaggtttagctcctgtttgaagccatttaagagcaagctcttcgttgattttcacttcagccggctttgcaaccgggttgtatgtgccgactgtttcgatgaaacggccgtcacgcggtgaacgagaatctgctacaacaatacgatagaaaggagatttttttgctcccatacgttttaaacgaatttttactgccattttactagcacctccgaaaatatttcaacaagatagtatattaacaatgataaaagtgtttgtaaagtgttttttcttaacaacggttttatcatgtataaccgattacataaaaggtaatttaaagccttttttcttcccttttgtcatgttggtcatctgcttcatcatttttttcatttcctcaaactgctttaaaagacggttgacttcctgaacggatgttccgcttcctttggcaatccgcttccgccggctggcgttaatgatatccggctgttctttttcaagaacagtcattgatttaatgatcgcttccacatgattcagctgtttttcatcgacttggatgttttttaagcctttcattttgcctgcgccgggcatcatttgcaacagttcgtcaagaggccccatgtttcggacctggccgagctgctccagaaaatcatccaatgtgaagctcatcgttctcattttctgctcaagctctttggctttgtcttcatcaacggtcgcctgagctttttcaatcaaggtcagcacgtcacccattccgagaattcgggatgccatccgttcaggatggaacgcttcaagagcatcgagcttttctcccattccggcgaatttaatcggcgtttcggtgaccgcgcggatagaaagcgccgcacctccgcgggtatccccgtcaagctttgttaaaatgacgcccgttaaaccgagctggtcattaaagcttttggcgacgtttaccgcatcttgaccggtcattgagtcgacgacaaggaaaatttcctcaggatttgcgacttcctttacgccggagagctcatccatcagttcatgatcgatgtgcagccgtccggcggtatctaaaatcacataatcatgatgctcttccttcgctttttcaatcgcctgtctggcaatttccaccgggctgacctgatcgccaagcgaaaagaccggcatatcaagctgtttccccagggtttccagctgtttaatcgcggcggggcggtaaatatccgcagccacgagcagcggtttgcggttatgttttttgcgcagcaggttggcaagcttccccgtggttgtcgttttaccggcaccttggagcccgaccatcataataacggtcggcgggcgtttggcgacggcaattttgctttcttcgccgcccatcagctcggtaagctcttcttttacgactttaataacctgctgaccgggtgtcagactctgcataacgtcctgtccgacagcccgttcacttacttttttcacaaaatcctttacgactttaaagttaacgtcagcctcaagaagcgcaagacgaacttcacgcatcatctcttttacgtcttgttcgctgacttttccttttccgcggatttttgaaatcgtcttttgcagtcggtcggctaatccttcaaatgccattgtttgccgcctcctaatctaatttctcaagcgcttcaatcagagccgtcattttttcctcttcctgcaacccggaagcaagctctttcagctttgtaaacatttctttacgctcctgaaactttttaaaaaggagcagtttttcttcatattgttcaagcatcgcttcagtccgtttgatgttatcgtaaacggcttgccttgaaacgtcatactcttcggctatttcaccaagggagaaatcgtccagataataaagcgacatatagctcttttgttttgacgtcagcaacgactgatagaagtcaaataaatagttcattctcgtcgttttttcgagcgacatttgagctctcccctttgttaagtcaaatccctttacaaaaacttagtttacatggtttcagagcgtgtgtcaagtttttatcttgtcaaagcaggatgctctttttacataataagttttttcaaaaaaattcatatagaccgtcgttaaaatactcgaattcttgttttgatacacgatagcggcaatagccttcgtaaaaagcattgaggcatgcttcatttgtgacaaaatgactgatcgctaatgattcatcatatcgcggatctcccgccgatattcccgcagcatcgataaacagatagacctctccgtctttcaccagcacattatcagtcgtgcagtcaccgtgaatcattgtctgctgaacaggaacaggcctgcacctgtccaattccttcaaaagctctgcacttccttcagcctgtccttttttgacatattccccggctcgtttgatttgtagatcgagccagtctgtttccggctgtaaaccagagaccatttcggtttcatgcagacgttgcagaaactggccgaaacttttgatcagctttttcttttcagtatccccttttgcttttcttaaagccgaagtcagtgtgattccatcctcaaatgacattacgatatggctggcatgctgttcctgtatcatcccataataaataggaacaggcagacgacgagtttccgtcagtttttgtaaaacgaaggcttctctcattaaccattcccgatacttctgttgaaaagaacttttcagcagaaatgcgtcttggccggtcactattttccgaacggttgaagtgcctccctgttcatccagcagcgacatatggtttatcgcgccgatcttactttccaattcagctttcagccatttgtccaacaactgccccctccattccgatctatcaatgcgtataaaaaaacgagtataaaaccgtccattttacactcgttttttattcattaatcctcggctttttcaactaaatcagaaaagagaccgtatacgtaagattctgcatcaaaccgctggagatcgtcaaccttttctccgaggccgaccagtttcacggggatgtgaagctcattgcggatcgccaagacgataccgccttttgcggtgccgtcaagcttcgttaacgcgatacccgtcacattcgtcgctttggagaattctttcgcctgcgccatcgcattctgacctgtcgtcgcgtccagcgcaaggagaacctcatgcggagcctcaggcacttcgcgttcgatgacgcgtttgactttttcaagctctttcattaagtttactttattctgaaggcggccggccgtatcacaaatcagcacatccgctcctcttgctttagccgcgtgtacggcatcataaataaccgcagcagggtcgcttccggcagcctgtttaatgacaggcacgcctgtacgctctccccacacttcaagctgttcaatcgccccggctctgaaggtgtctccggcagcgagcacaacggatttgccttcattcttcagcttatgggcaagttttccgatcgttgtcgtttttccgacgccgtttaccccgacaagcagaataacgttcaggcgcccgtcctgaatatttaattcagaaatctgttcgtcgccgctgttataaatgtcgacaagcttttcagaaatgacggactgcacttcctgaggatcctggatgtttttcagcttcacttcttttttgagctcatcaatcagctccatgacggttgtaaaacctacgtcagcgccaatcagcacttcctcaagctcctcgaagaaatcctcgtcgactttccggtagcgggagacgagttcgttcactttatttgagaaggaatttcttgttttttcaagaccatctttaaatttttcagagacggagtctgtctgtttcgtgattttctcttttaattttttaaaaaagctcatctttcaacctctttcctcgttactgaacgaattcttttgtttcttccagtttgaccgaaaccattcgggaaacgccggattcctgcatcgtaacaccgtagaggacatccgcttcttccatggtgccttttctgtgggtgatgacgataaactggctgtcgccgctgtatttttttaaatattgcgcaaacctgaatacattggcttcatcaagcgcagcttccacttcatcaaggacgcagaagggcacgggccttactttcagaatggagaataaaagggcaatggcagtcagcgcccgttctccccctgacaaaagatttaagttttgcagttttttacccggaggctgcgcgataatgtccaccccggaattaagaagatcattcggatcagtcagcttcagttcagcccgtcctcctccgaataaagaacggaacacgtcgttgaattgagaacggatctggataaacgtttcatggaatcgcttcgtcatttcagaatccatttcttcaatgacttgaaacagtgtatttttcgcttccgtcaggtcatttttctgctctgttaaaaactgataccgttcgtttactctttcaaattcatcgatgctaccgagattgaccgttccgagctcttcaattgaaagcttgatcagtttgacccgttttctcgcctcttcaggctcgagttcgagctgatattgttcttttgctccttcaaaggataagctgtactcctcgcgtaaatactgcaagagattatcaagctcaacttccatccggccgagttttacctcttcatctttcagaatgtctgttttttgcttgtagagacgcttcatctctttcagttcaagctcgttcgtatcaagagcccgctggagcttcacacgctggtcgcgccggctggcgatcaattcgatcgttctcgttttatcgtgaagcttgtgatgggctgcttcttcaagctgctcctcaccgcttgtgctggacgtcatctctgaggtcagaaggcttaaatcttcccgtgtttctttcagagcgagctgtgtttcttcaagctcttttttcagccttttgaggttgtcttcctcactcgagcacgcctgttcttttttcgcagcggccactttacattccgtcagttcatgagagagcgtttcttttgttgaggatagggtctgcttttgttttgtcagcctttccatctcttcctcaagctctttcagctggccggatgcctcactcagctgttcttccagagctgatttgcgcgtctctttttcccggctgctttcggtcagtgatgctttctcctgatcgtaaagctccagatgggtattgatgttcttttcagcaacttcgagttcatacagcctgccttttacatcctgctgctttgttctgaaagcttcaccgtcttcacggagaccgctcagcgtatgttcaagctcttgaatggcctgcttcagcgttttgacctctttttcgagcagagctgttttttcttccatttcggcaagccgcgcagtcaccgtctcaagctcacggcttctgccgagcagagaattgtttttctttttgaccgcgccgcctgtcattgatccgcctggattgacgacatcgccctcaagcgtcacgatgcggtagcggtgcccgagaagcttggccagttcattcgcgccttttaaatcttcagtgatcagcacggtgccgagaaggttttgaatgacattccgatacgcggcatcatatgtgacaagcccgctcgctgtgccgaggaaagacggatgcttctgagccgtctgttcatcacgggtttggagctggcgcggtttcataaccgtaagcggcaggaacgtcgcgcggccgaatgaattctgttttaaatattgaatcgctttccgcgccgcctgctcgtcgtctgtgacaacgtgctgcgccgctgcgccgagtgcaatctcgatcgccgtttcatacttttgttcggtggcaatcagttcgagaacggcgccgcggatgccgccgagcttctctttctgcttcagcacttcttttacgccttggtaaaatcctgaaaaatcgccttgcatcgtttcaagcatatcttttttggatctggcctgctggacgaattgatatgcctgatacagcgctgattctttcttttcatactggcgttttttctgttcatatgctgtctggacttcgcgaaagcggacgacctgattgtgaatatcctcttcaacggcagccaattcttcttcgcacgccgctttgcggactgcaatatcgttacgttcttcaagatatttttcattgtttgctgtcagtctcgcctgctggaccgcggattgggacatctggtcatctaaaagctgcagctcgttgcgaatcgacgcctggctgtttaacaattcaaagtaatcgctttttaattgttcgattttctcatctacattttcattatgcagactgagagcctgctgcttttctttcacttgggcgtttaaccgcttcacttccgcacgcagcttatcatagacggcagactgtttttcaatgtccgctttcagttcggcttctttgttcgtgtaatgtgtaacggattcctcaagctgttcccggttttgcgcggcgttttttttgcgctctttcagcacttctttccggccttccagcttttccagctcttcacttgtcacgagcagaacctgctgcagttcgttgacggattcatcaagcgcgtggattttatctctcgtctcttctatcatcgcttcttttgcggatagagccgatgattccgccaattcttcttctttagcagcctgcaccttgtcttttaaacccgaccatctgccatgcagttgttcgatgtcaaaggcggtaagggcgatttcgacatgctcaagctctttctttttttctaagtagtctttggcgattgatgcctggattttcagcggttcgacctgatcttcaagctcgtgaagaatatcttccaccctgtttaagttatcctgcgtctcaaacagtttgttttccgcttttttctttcttgttttatatttcagcacgccggccgcttcttcaaaaatactgcggcggtcttccgctttgctgctgagaatctcttcgactttcccctggctgataatagagaatgcttcttttccgagcccggagtccataaataagtcaatgatgtctttcaaacggcactgctgattgttgatgagaaattcactctctccggaacggtacacccgtctcgtcacgctgacttcgtgataatcgatcgggagaaaatgatcttcattatcaagcgttaacgtgacttcggcaaggttcagccgcttgcgtgaatcacttcccgcaaaaatgatatcttccatttttccgccccgaagcgagcgggctgattgttcgccgagcacccagcggatagcttcggtaatgttgctctttccgctgccgttcggaccgacaacggccgtgacgccttttacaaagtcaacggatatccgttctgcaaatgatttaaatcctataacgtctaaacgtttgaggaacatcccagatcctccttatcgtataagtatctcaatattatcataatcacccgcttatatcaggcgcagacatactgaaatccccctagggatacagggggattttattgtttcgtatgatgtttttgcaattttgcaagagcttcctgtgccgcatgctgctcggcttcttttttggaacgtccgttcccgataccgagcgcctcacctttaagagagactagcgcctcgaattcccggttgtgggcaggccctttttcattgagaattttgtactcaagcgatccttttccgtcccgctgtacaaattcttgaagctggcttttgaaatccatcacatgagaaaaagcaccatcgtttattttagggaacacgtacactttcaggaattgctgaaccgggtcaaggccctgatccagatacagtgcgccgataaacgcttcaaacacatccgctaaaagcgcaggacgctttctgccgcccgtcatttcttctccttttcccaagagaacaagatcgccgaatgacaattcatgggcaagtgagacgagtgacggctcgcatacgatagcggctctcagcttcgtcaaatctccttcactcatggccgggtatttggcaaataagaattgggagatcgtcagttccaaaacagcgtcacctaaaaattcaagcctttcattgtcttcatacggctttttccgatgctcattcacataagatgaatgtgtaaatgcttgatacaaaagtttctcgttttgaaaatgaaccgaaatccgttcttggaactctttaaattgctctatttttttatagaacttttttttatctttaaaatgtgagtgttttgacatagtaacctccataggcacatcaggttcaccgcgctccccgccgtaaacggaatcggcagcgcgtacagcgtcagacgccggtaaccgaacgattaaagggctaaagccccgctgtcaggcgggacttttagcatcagcttattgctggttttgtatgtagttcacagcgtcgccgactgttgcaatcttttcagcatcttcgtcagaaatctccatatcaaactcgtcttcaagttccataacaagctcaactacatctagggaatcagcacctaagtcttccttgaaagaagcttcaagtttgacgtcagcttcatcaacgccaaggcggtctacgatgattttcgttacacgctctaatgtatctgccatagcaattcacctcccctcaagtattatagaggattcgtttttaaaaaactagagaaactaggatgaaattttaaaaacaaatctttacatcaccattccgccgtcaatatgaagggtttggcccgtcatataacgcgatccttcagaagcaaggaacgtaacaacgctgctgatatcggaaggatcaccgaaacgcgcgagcggaatctgcttcagcatttcatcttggacttctttagaaagcttgtccgtcatatctgtagaaataaagcccggagcaatggcattaaccgtaatattgcggctcgcaagctctttggctgatgacttcgttaagccgattacaccggcttttgccgccacatagttcgcctggccggggtttccgctgacgccgacgattgatgatacgttgataatccggccggagcgctgtttcatcatctgtcttgtcacggctttcgtgcagttgaatacacctttcaggttaatgttaatgacatcatcccattcattttctttcattctcatcagaagattgtcttttgtgatccccgcattgttcacgagaatgtcgattgaagaaaatgcagcgacagcctctttcatcatgttttgtacttcttcggaatttgatacatcggcttttaccgcgatcgcgtttcggcccaaagatttgatttcatctacgacttcgttcgctttcgcttcattcccggagtagttgactactacgttacagccgtttttcgcaagatcaagcgcgatcgcccgcccgattccgcgggacgctcccgttaccactgctgttttttcattaagcatcctgattctcctccttcagcgtttgaatcgccagttcgatggtttcatggtcagaaaccgcgattgttttaaggcggcggttcacttttttcacaaggcctgaaagcacttttcccggcccgatttcaacaaacgtcgtgacgccttcgtcaatcagtttgttaatggtttcttcaaagcgaacaggtgaatacagctgttcgatcagttttttcttgatatcgtctttttctgtcataacgtcagccgaaacgtttgaaatcacgggaacagccgcattttttaactcacaggcgctgagcacctcctcgagtttttgcgctgccggcttcattaattcagaatggaacggtccgcttacttctaatgggattgcccgttttgctccgttgtttttcgcttcttctgaagccagctccacgccttttgccgttccggaaattacgatctggccggggcagttcaagtttgcaagctgtacgagatgaccgttttccgtcacttgatccgtcacctttttcaaggactccgcatccattccgagaatagcggccatggcgccttctccggccggcacggcttcattcatgaattctccccgttttcttaccgtgtaaacggcatctttaaatgtcatcgctcccgccgcaacaagcgccgaatattctccgaggctgtggccggcggtgaaatcaggggtgatgccggattctttaaacttttccaatacggcgatgctcgttgtcaacagcgcaggctgcgcattgtatgtaagggtcaattcttcggcgtcaccttcaaaaatgagcgagctcagctttgtttcaagcgtttcgtccgcttcatcaaaaatacgttttgacgcttcttcgcgttcgtacaggtcttttcccataccgatatattgtgatccctgtccgggaaataaaaatgcaatcttactcatgatgcggtaacctccagactactcatctgttttttcttcttttacttcttcttctataaatgcggccacgttttggctgaccatttctctcgcctggcgcagcgcatggtaaacagcgcgtgcgtcagaagagccgtgcgctttaacgacgggcgctttcaaaccgaaaagactcgccccgccgtactcagaatagtccattttcagtttcatttccatcagcttcggcttcagcactcccgctgcgagcttagaaacaaaacttgaagtcagtgtatctttcagcattttgaaaatcgataacgctgaaccttccaatgttttcaacgtgacgttgcccgtaaagccgtctgtgacgatgacgtcagcagcgccttcgagcaagtctctcgcctcaacgtttccgacaaaattcacgtttgtttcttttaataattcaaacgtcttttttgtcaggtcgtttcctttcttttcttccgtgccgacatttaacaatccgacgcggggcgagctgattccgagaacctgccgggcatatacagatcccataattccgtactggacgagatgctccggtttggcatcgacattggctcccacgtccaaaagaaggaaaccgtcgcctgaaacggtcggaagcgtcggcgcaagcgcaggccggtcgattcctttaattctgccgacgataaacagtcccgctgtcatgagtgcgcccgtattccccgctgagatgcaggcgtccgctctgctttcagccacttcctgcgccatcagcaccatagaagagtttttctttctgcgtacggcgcggaccggttcatccgtcggttcaatcacttcatcggcgtgcaacacagtgatgcggtctgatgttgttggcaagtgtgattctatcgttgtcttgtcaccgaccagcgtaatatgaagatcgtcaaatgcctcaatactcttcattactccgtcaataacagctttgggtgcgttgtcgccccccattgcatctacagctattctcatgcatgctccacctttatgattgttttgaacgatacatgtcaaagctgccggagaacacgacttcttctcccacatagctgttgacttcaactaccgttctgcctttttctttttcgactgccgtcactttggctttcgcaacgacgcgctcgccttctttcacctgtcttgtaaagcggatatttgcgcttgcggtcagcgccagctcatcatcaatgacggctacggcgagtgagttcgcctgcgcaaacaaatgatgcccccgcgcaatttgattgcggctgaagacatgttcgcgtcttacttctaatatggaaatggcctggccgtcaagctccagatcaataatttcaccgatcacttcgtctaaagacagtgatttcacttcatcatcaagcgtttgttctgccacgtttttaattctttccctcagctccggtattgagagctctaagcggtctaaacggatcgtctgaatgctgacgccgaatttccccgctaattcttcatctgtgatgaagggtgtcgatttgatcgtctgctgcaataatttttggcgttctttcttgcttcttctcatctgtaaacaccatccggacaattaagactaggtactaatagtagtatataatctcatagattggaatgcaatgattgttttttgaaagccgccgaattttgcagaatcagcttaatttctccccttccaggacgccgcttgaaagtaattgaccgcgcagcatgcggtattcgtcatctttccaaaaagcctctgaagacaccagattggccgcatcctggcgggccgtctccaaagctctgtagtcatgaaccatatccgccaccttgaactcgggcataccgctctgtttttttccgaagaaatcaccggggccacgcagttcaaggtccttttcagacagctcgaagccgtcgtttgtctctgacatgattctcatccgttccttcccggtttcggatttcggatctgccatcaagatgcagaaagattggtggtctccccgcccgacccggccgcggagctgatggagctgagataacccgaaacggtcggcgtcatagatgaccataatcgtcgcattcggcacgttcaccccgacttctacgacggttgttgacacaagtacctgacattgattggcgctgaattctctcatcacctgatctttttcatcagaatggagcttcccgtgcatcaggccgacattccatttaccgcggtaaacgtcagacagcatgttatatacgtcaatcgcattctgtacatccagtttatccgactcttcaatgagcgggcagataacataggcttgccttccctgcttcagctctttttctataaaagccaaaatccgctccagcatgtcgtgtttcacccaatacgtttcgatttgttttcgccccgcgggcatttcatctatcacggaaacatccatttctccgaagacggtaatggccagcgttctcggaatcggagtagctgtcataaacagcacatccggatcctgacctttattcttgagttttttgcgctgttcgaccccgaaccggtgctgctcgtccgtaataacaaggctcagcgctttgaattccacttcatcctggattaaagcatgggtccctactaaaatatcaatctctccgagagcaagccgctccaaaagctccctgcgccgctttcctttgacagaactcgtcaaaagcgcgatatttacatcttcatttgcaaacaacgatacgagagaatctgcatgctgttcggccagaatttcagtcggcaccattaatgccccctgataccccgacaaaatcgcagcgtacaaagcgatggcggcgacggccgttttccctgatccgacatcaccttgcagcagacggttcattcggtaaggggatgtcatatcagcggtaatttcccgaagcacacgcgtctgtgcggtcgtgagcgaaaacggcaggctgtctgtgaaagcggcgagcttttcagcaggaaacacatggctgatgccttttgactgttccctttccgctttacggaacgcctgcattttcagctgaaataataagaattcctcgtaaacaaaccggcgtcttgcctgctgtaacgattcccgcgtttcaggctgatgcatcgtctgcagggcatgtttgtagtcaggaagcttgtagcggattctcaatttttcaggaagcggatcagccgcactgtccaaatgatgctgcagcgcttccttaataaaccgtctcatcatttttacggtgacgttttctttaacggaataaacaggctcaatgcttttatcttcttgatgaggaccgttttttaattcctgcacggaaacggtctgtctgtgtttatcccatttcccggatatcgtgacgacagaacctaacgtcagtttcttttttaagtagggacggttaaagcagaccgcggtaattaaataattgccgacaagcactctgaatgtcagcctgtttcgttttttgccgtaataggtaagagaaggttctgaatgaaccttcccttctaccgtcactctttcttcatgttttacttcttctaaatccctcagctcatagtcatcataacggtaagggaaataattcagaagatcagaaatgtcatagataccaagttcgtgcaatgttttttctgtttccggcccaatgcccttaatttccgctatactagtttgctgatggtgtgccacttgatttcagcgctcctccgaaaatttttttctctaattctcttcccgtcggtgtcgcggctaaaccgccttgtcccgtttcacgcagtgctgtcggcattgtctggccgattttgtacatcgcgtcaatcacctcatcgcaaggaatgcggcttgtaatcccggccagcgccatatccgccgcgatcattgcgttggatgctcccattgcgtttcgtttgacacacggcacttctaccaatccggcgaccgggtcacatacgagaccgagcatatttttcagtgtaatcgccattgcttccgctgattgctgaggcgttccgcccgccatttccacaatcgcagccgctgccatgcctgatgctgacccgacttccgcctgacagcctcctgccgctcctgaaatactcgcattatttgctacgacaaaaccgaacgcgccggctgtaaacagaaaacggatcatttgttctgtcgtagggttcagcttatgctttacggcgaataacgttcccggcacgaccccggcagagccggcggtcggtgtagcgcagatcgttcccatcgccgcattgacttcatttgtcgccacagctttagaaacggcgtctaaaatcagattgcccgacagacttcttcccgattggatgtatgcctgaagtttcacggcatctccgcctgttaaaccggtctgactcgtgacgcccttcagccctttttcaacagctgcttccatgacggagagattgcgctccattccttgaaagatttcttcccgcgttttttgcgtcacttccatctcttgggtgatcatcacttccgaaatcggaatttgtttttcttgagtgatttctattaattcttttacattacgaaacatgtcattttcctcctgactttttagtcagctatcttagtaacctgtataatattaggaagtgttgaaagctcgtcaagcacttcttcttcaatattctgatcgacctcaatcgtcatcagcgcaagctggccgacgtccttacgcgccacttccatatgtccgacgttgatggagaatttcgcaagcacattggcaacgcctgcaatcgtgccgaatttatcattgtgaacgactaaaatagccggatggtttccggacaaacgcagctcaaagccgttgagctccgtgatttctatttttccgccgccgatggaaataccggtaagggcaagctctccctcatcatcagaaatgacgatgcgcgctgtattcggatgaacgggcacggcatcctctgtacggaactctacatatatgcccttctcttccgcaatttgaatcgctgttttaatccgctcatcaaatgtatcaaaatcaagcaggccgccgataatcgcgacatcagtgccgtgacccttatacgtctccgcaaatgatccgtaaaaagacacaacgattcggcggggctcccgcctgaataagcttctggccactctgccgatccgggcggcgcctgcggtatgtgaactggacggaccgatcattaccgggccgataatatcaaaaacgcttctatacttcatgctggtttgttcctccttaacatcactttattcagcgcttttctttagactaattgaacatttctcaattggcaagcaggcacactgccgcactgccgcaggtaaataaaggcataagaatagaagggcctgataagcccttctattctgccgcaaatatatatggatacagaggctgtctgccgttatggatttcaacctcgatatcttcacagacgcttgcaatatactcagcgagtttctcagcttcttcttccggcgcgtcctctccgtacaggatggtgatgatttcatcttcatccccgatcatttcatccagcagcaatttcgccgcacttatccgatcttcggcgctgccgataattgaactgtttaaaatgccgataaaatcaccttttttaatatctttgccgtcgatatgggtgtctctgactgaatatgtcacctgtccgcttttcacattccggatggcctcaagcatattggcttcatttacgtcagccggctggtcagggttaaacgcaagcagggcggtcatgccttgagggaccgtttttgccggaatgacaatgacattttcttcagccacgctcgccgcctgattggcagccatcacaatattggaattgttcggaagaatgaaaaccgtctccgcattgacagactgaacggcttcaacaatatcttccgtgctcggattcattgtctggccgccttcgattacgtgtgaagcgccgatgctcgtaaacaattcagaaatgccctctcccattgccacagtcacgatgccaaaaggcttgcgggcttctttcataacgccggccggctttttttcatcatgttcttggctgatgattgaagtatgctgttccctcatgttttcaattttaattttaatcaaatcgccgtaacgctgtgcgagattgagtacgttccctggttcttcggcatgaatatgaactttcgccagcgtgtcatcagccacgaccagcaatgaatcgccgaaacggctcagttcgtttctgaacgtctcttccttgaacgtccgtttatcttgatccagccttaccatcacttccgtacaaaatccgaattcaatgtcttctgtactcagcatgctctgcgcgcttttatgatgctcggcattcaccatatcatcgagtgccggaagaaccgcttttttcggtacggcctctccttttaaagcagccaaaaagccttcatatacacaaagcagaccttttccgccgctgtcaacgacaccgacgtcctttaaaacaggaagcagatccggcgtgcggttcagcgacgcttccgcttcttcaataacggcctccatgaccgaaataatatcggtttcttctttggccgaggcgaccgcttttttagccgcatccttggccacggttaaaatcgttccttcaaccggtttcatgaccgccttatatgccatatccactcccgcttggagtgctgcggcaaattcttgggcgtctatttggtttttgttttcaatgctctttgtgaaacctctgaacaattgggacaagatcacccctgagtttcctctcgctcccataagcaggccttttgacaaggcgatgccgactttgccgatgtcgggtgagtcaatgtgctctacctctcttgcaccggatgacatcgataaattcatatttgttccggtgtcgccgtcaggcacgggaaacacgttcagcgcatccaccgcggatgcgttttgagacaatgtctcagcccccgccagaatcattgccgcaaaagctctcccatctaagtttcgtctagacaatactcatcctcctcactacgggttcgttactcgtacgccttggacataaatatttacagaatcaactgcaagtccgattgtttgatttactgtgtattttaccttcgtctgaacattgtgggctacttcggatattttagtgccgtagctgacaataatgtacatgtcgatatgtatttgttcggcttcctgacggacatgtacgccttttgcgaagttctctctccggaggatttcagacaaaccgtctttaatctggttttttgaggccatccccactattccgtaacagtcaatggcagcgcctccggcaaccattgcgatgacttcgttggatatatcaatctgtccgtattttgtcttcatttcaatggacacacaggttcctccttcagatgcatagagttatcattattctactatatgtatcccattatgaaaagaaaagatacagacagcggccttcagcgcggaaatgtgattggttttacatgtcaagtgatttttcttgaaagtaagggaaacaatagttgcaaacggtttttagctgtggtaaattatttaaagtattgtataacgaaagcatctgagacactatgtttgaaaagatgtttcgcgcagttaggagggaaacaaatggcacgtaaatgttttattacaggtaaaaaaacaaaagccggaaacaaccgttctcacgcaatgaacgcttctaagcgtacttggggcgccaaccttcaaaaggtccgcatcctcgttgacggcaaacctaaaaaagtatatgtatctgcccgggctttaaaatccggtaaagttgagcgtgtataagcaaaaatgaacgcctgcccttttatgcggcaggcgttttttatgcgttcaaagagggcaatttcagcttcttgggcttactcttttctaaatgagcccagcatcgcccggacaattcctcctaaaaacttcggcaatttaatggtataaaatttcattttgtcccctcctataagtcccgtatccgctgcgttcatcactttaggattcatggttttttccgcatatggcagaagccgcttttctaatccgcgctccttaccattattaatatgccttttgcaaacgaaaaagtacctcgtgaatgaatgagttcgttactaatacatagtgtggaacccagaggaatatgacaattatcaaggggatatttaaaaccgtcgagtgtcaggccgtctgccgcttccgtaaacggaatgaaagaaatatagcgtctgcgcactttttcttcaattgtataacggccgggcccgaacatctgaatgtcattctgccggtcgatcagctcgacatcggtattcttatgtaaggctttatacagcagctggatattccctaaaaagtgatcggctcttccgcccgtcacaccgaatatccgaatgttttccggttctttttgtaaagcccagtcaagggcgagttcaagatcggtataatctttttccgcctgatacacatggagggccggcgctgctttttgaatctgcatgagctcctcttccgtaatgctgtcaaaatcaccgaaagcttcctgcggaatgattccggcctccaaaagagcaaccgtccctttatcgactccgacccacgtcgtatctccgtctgtgtattcggatagatcgggaataagctcccgcgggcctcccgcaacgatattgattgtattcatatgttatcctctctcttagacgcgaaaagagccggcggctttcaccgggctctttttcagcatgtttatgatgcgtttcggatgtcagcgatggcttttttccgatccggctgattatatacggcagacccggcaacaagcagattggcgcccgcttcagcgcataaaggggctgtttctttattaacgcctccgtccacctcgattaaaagctcagacaggcctttctcctcagccagctgtttgacctgacggattttcggcagaaccgaatgaatgaagcgctgtccgccaaaaccggggttaaccgtcattaacagcacaaggtcaagctcctcgatcacatgttcaatcgtttggacgggcgtatgcggattgagcacaactcccgcttttactccctgctcttttatcaattgaatggtccggtgaagatgcggacacgcttcagcatgaacggaaaggatgtccgcaccggcttttgcgaatgccgggatgtagcggtccgggttttcaatcataagatggacatccagcggcagatcagtcaccggacggacggcttcaacgataagcggcccgattgtaatgttagggacgaaatggccatccatgacatcaatatggatatagtccgcccctcctttttccacgtctttaatttcctcgcccagtgaagcaaaatcggcggaaagaattgatggcgcaaccttaatcatattaatacctcggctttctctcttttatttcctgcataaattctttgtaatgctcatagcggtacggctgaatctctccttcttccaccgcttgctttaccgcgcatttcggctctttaagatgcagacagcctctgaatttgcaagaggcgcttatttctctgatctcagggaacgtgctgcccagctcttcttcctcaatgccggtaaattcaagcgaactgaaccccggagtatccgcaaccagaccgcctgatgtatgaatgagctccacatggcgcgtcgtatgttttccgcgtcccaaatgcgcggaaatctcgtttgttttcagctcaagctccgggctgatcgcatttaaaagcgaagattttccgactccggactgaccggcaaacaccgtcgttttgttctcgaagtgtttcacaatgcctgttaagccgctgttttcttttgatgacgtcacatatacgtcataaccgatcgcctgatagtctttcacgtaagaaagtatcgcctctttcgattccccgtctgcagctaagtccattttggttatgcagatgatcgggtgaatgccgttggcttccacaaggacgagaaaacggtccaataaagacgtgctgaacgccggctgaacggcagaaaagacaagaacggcctgatcgacatttgaaatcggcggcctgatcagctcgtttgttcgttctttgatttccagcaggtagccttctttatcattttcagcctgataaacggcataatcgccgaccaggggcgttattttattttttctgaaaatgccccggcccctgcattgaatgatcttgtcctgtgattcatccaagacataatagaatccgcttaacgcttttataattttgccctcaggcatagggtccctccttgtcagtcattatctttcgggtattcaatcgttttgtagctgacgactttatgatcgaccatcacttgataataccccttctgtccctgatcaatcttcagttcaattgttttttcagtcggctcttttattttaaatgagtcatacgtatcagagatgctgtggtccttatcatcgatggcgatttgcacttcaagctcgtccccttcatgttcgggttcgtaaggaatgctgattttttcttttaccgttttcgccggtttttcttcaggtccgagcgagaacgtcacttcaacattacttcccggcttaaccgcagtgccggctgccggctcttgcttcatgacttgtccttccggcacgtcatctgaatgggcttgtttttcaacaagctgcaggccgttatcttcaagataccctgaagccgcttctttgctgtaagtctttaagtccctcagcgtaacgtccgccgggccgaggctgaccgttagattgacttcatcgtcgcttgcaaccatgtcggtgccggctgacgggttctgatcaattacggtgccggcctcgctgtcatcgttctcttctttgacattgacatgtttgaagcctttttccttcagcgctttttttgcgtcgccgatctgccgccctttcacgtcgatcagctgggttttcggttttccgatgcttttgtacagttttacagaagagctttctttaacggtagaccccgcttttgggtccgttttgaccattaattcctcttctattttttcatcttcaatatccgttatatcaggatccgcccggagcccgttcttttcaagcagggcttccgctttttcgtacttcatgccccgtacatcggggacgcttacatctttaggcataaataaagacggaaacacggtgaccgcaagaacagctgccataatgaaaatgaaacagacggccagcaaaacccacggccatttccgttttttctttttggcgggctgctgttccttatcatccgtctcccccggcgtctccgcctgaggcgcggcttttgtgccgtcagtaataacgggaatggcttttgtcatttcctcatcatcctgcacggaaaatttttgttcattcagcctgccggcgtcaaaagccgttctgatgtccgcttccatgtcctcggcgctttcatagcggtgaaacgggtctttagcggttgcctttaaaataatgttttcgacgctctgcggaatggaagggttccactttctggcggaaggcgtttctgtttgcagatgctttagcgctatactgacggctgattctccgtcaaaaggaattttacctgttaaaagctcaaacagcacgatgccgagcgcgtaaatatctgattttttcgttgccagaccgcctctcgcctgctccggagacaaataatgaaccgagcccagcacagaattcgtatgtgtgattgtcgtagacgtaagcgctgtggcgatgccgaaatccgtcaccttgatatgccctaaatgatctatcaatatattgtgcggtttaatatcccggtgcacgatatggttttgatgggcatgggcgatggccgagacgatctgctccataacggacagcgcttctttcggatgaagcggtccgtgtgcttttatgtattcctttaatgtcatgccttccacatattccatgacaatgtaataaatatcgccttcctccccgatatcgtaaatactgacgatattcggatgatcgaggcttgatgccgactgtgcttctcttctgaaacgcctgataaaatcaatgtcattcacaaagtcaaaccgcagaattttaattgcgacttcacgttcgagaatgatgtcctcagctaaaaaaacgtttgccattccgccgccgccaatgggccgaaggatatgataacgcccgctgatccgcttgccggttagcacttgtcttcaccctcttttgcatctgcggaaaactcaatcaacacagccgtgatgttatcttcgccgccgttttgattcgctttgctgatgagaaggtctactttttcctgaggatcagattcggcttgaagcatttgtttgatctcgtgatcttctattttatttgacagtccgtcagagcataaaagcagctgatcgccgtcagacagttcaaaagaacgggcgtcgggactgatggtttcatctgtccccagcgctctcgtcaatacatttttccgcggatggtgctcggcgtcctctttcgaaatttcccccgtcttgaccagctcattcacaagcgaatggtcttcagtcagctgagtgaattccccctcttgaagcaggtagcaccggctgtcaccgatatgagccacagtgacaaacttcccggtgaataaggcgcaaacaacagtggtgcccattccccggcattcttcattcgctttagcgtggtcatgtactttgacattcgcctcatgaatccggtctttcagccaatcctcgcaagcagacggcagagaaggaaccgtttcggtccggttccactgctcttccatcgccgcaaccgccatcctgctcgctacatctccggcaagatgaccgcccatgccgtcggcgacaaccgcaagcaccgcgtcttcttttgtgaaaatgcccgccgcatcttcattatgccggcggactttacctgtatctgttttcaaggctgtaatcaacctcttcacctcgtctcgtcttgacgctccttcgcgcgaagctgaccgcaggccgcgtcaatgtcatggccttgctctcttctgatcgtgacatttacaccgcgggattttaacgttttttcgaatgcgaaaatctgatctctcggtgtgcggacgtaatcccgttcaggcacatagtttaccggaattaaattgacatggcatttcacgtcttttaacagttctgcaagctcttctgcatgttcgacctgatcatttacgccaccgaacagcccgtattcaaagctgatccgtctgcctgttttctcgatgtaatatttgacggcctccataaggtcaggaagcttataggctttgttaatcggcatcagacggcttctgatttccgtattcggagcatgcagagaaatcgcgaaattgatctgcattttttgatcggcgaaatcgtaaatcttcggaatgattccgctggtggaaactgtgatatgacgcgctccgatgttcagccctttatcgtggttaatgatttttaagaaagcgagcatttcattgaaattatcaaacggctctccgattcccatgatgacgactgagctgacgcgttcatccgtttcatcaagcgccttttgcactttcacgacttgagcgacgatttctcccgcttcaagattccgtttcagtccgccgagcgttgacgcgcaaaatgtgcagccgatccggcagccgacctgtgtcgttacacatacagaattaccatactcgtgtctcattaaaaccgtttcgatcgtataaccgtcatgaagctcaaataaaaatttcatcgtgccgtcttgagatgtctgttttacagccgttttcagcgttgtcagcacaaaattgctctcgagtttttcacgcaggctttttgagaggtttgtcatttcatcaaatgaagaaacccgcttctcataaagccattcaaaaatctgtgctgcgcggaacggcttttcgccattctcggtcagccattgtttgatttcatctaattcaaaagagtaaatggacggctgctcagtccgcagctctttccgtacgcttgtcttttttaattgtgtcattttttatcccttctttctcatgctgctaataaagaaaccgtctgttccgaaataatgcggaagaatttgaaggcttccatcctgaacaaagggtctcgccttttcaggcagccgcttttcaagagacaaatcgggttcaaactcagggtgttcttgtataaacgcatgcataacttcttcattttctgtccggtccattgtacacgtactgtatacgagtgtgccacctttttttactaatggggcgatttcccttaaaatgccgagctggatttctgacagccgtctgctgtcctccggcgtcttcgtatatttcatatcgggttttcttctgatgacgccgaaacctgagcaaggggcatcaacgagaacacggtcaaaccgttctgcgccaaaggcctctcccgcttttcgcgcatccatcgtttgcgcgtcgatgatcgtaagcccgagccgttctgcgccctctttaatcagcttcactttatggcggtgaagatcaagcgatgtgaggctcccctcgttctccatcagttccgcaatgtgagccgactttccgcccggtgcggcgcatgcgtctaaaacggtttcgcccggcttcgggtccagcgcccgcgcgacaagcattgagctttcatcctgtatggatacccggccgttttggaaaaatgccgtgttcgcgatgcttccttttaaaagcttaatcgcatcaggagaaaggtctccggcttcagcttcaagaccggcattctccatctcattcagcaccgtttccctgtcgctctttatgtgattgacacggagcgtctgcttcggcggaatgagatgaatccggcagatctgttcagctgcctcaaagccgtacgcctcgacccactcttttacgagccactcgggatggcttgtctctgtggaaagacggagaaccgggtcttcaatttcagcgaatgacggcgccccttcacgctgcagggagcggaggatgccgttgacaaaggacgcaatgcccttatgcccgcgttttttggcgatctcaaccgcttcatgaatggcggcgcgatccggtattttttctaaatactccatttgatacgcggacagacgaagcagctgaatcacccatggcttcactttattcggcttgcggataaaaggcttcagcatgtagtctaaggcgattttattttgcagcgttccgtagacaagctctgtcagcagtcctctgtcctgatcgctgagcgtgttcgttttgataaccgatgtaagaagcaggttgctgtatgcctgattttgctcaagcttctcaagcgcttcaagggcgagctcccggacattaattttcttcatttgcttctcctaatacgtcaccgggctgcacatttttgcctcttacaaaatcttcgcccttcatccgtttttttcccgccggctgcagctctgtgattaaaagggcggtgctgtttcctgatgcggcgacaatgccgttttgctccgtgcggatgactgttccgggcgcagcttcagtttttgccgcaactttttcagaagcccatactttcatattttgaccgttcaaagttgtataggcgacaggccaagggtttaaacctctgatctggttgtagatctcttctccgggctttgcccaatcaatccgctcctgctcacgcttaatgttaggcgcgtaagtcgcttttgattcgtcctgtttgatcggtttaatatttccggaaatgacgttcgggacggtctctgacaaaagcttcgcccccgctatgcttaatttgtcgtgaagcgtgccgacgttatccgtttcatcaatttccacttcgattttcgaaatcatatcgcccgcatcaagcttttcaaccatatacatgattgtcacgcccgttttcttcttgccttggagaatcgaataatgtatcggcgctccgcctcttaattcaggcaatagtgacgcgtgtacgttgatacagccgtatttcgggccgtccagcagctgcttgggcaggatctgtccgaatgccgccgtaacaatcaggtccggcttcaggctgagcactttttctatttcttcttcgagccttactttttcgggctgaagcacgggaatgccgtgacgttcagcttcagcctttacaggagggggcgtcatgattttttttctgcctttcgggcggtcaggctgcgtaacgacaccaaccacttcatacccgtcttcaataagcgtgcgcaggacgggaactgaaaaatcgggcgttcccataaaaacgatccttgtcatccaatcatccttccatttctgccagttcttcttcagtatagtaagccgtaatttttgatgtgaataaaatgccgtctaaatgatccatttcatgctgaacggctctggccaaaaaaccctccgcttctaaaataaacggttttcctttacggttataggcttttacctttacgtaatccgggcgggtgacatcgccgtaaaccccgggaaagcttaagcagccctcgactccggtctgttcaccgctcttttcaagaataaccggatttacaaggtcgatccggccgctttcttcaccgatgtccacgacggccgctctttttaaaatgccgatttgcggcgcggcgaggccgacgccatccatttcgagcatcgtatcgtacatatcgtcaagcagtttttttaattttttatcaaacactgtcacttcatcggctggtgtttccagaacctccgccggatgtgtgacgatttttttcacagccaaaattttgccctccaaaaactaatgttacatcagcatgtacggattcatatcgattgaaatcatgacatgcttttgcgcaatgtcgcgtttatagtgctccagtatctttttcaactgaatctgcaactcgttttcctgtctgtattttatcacgcattgatagcgatatctatctttgatcctggcgatcggggaagccgccggcccgagaattttcgtatcaggcccgcatcccgctcttaaatagtttgtaatcttttctgcggtgaccgcggcttttgccgcttcttcatgagaaacggtcaccagcgccacgtaataataaggcgggtatgactgggcccgtctgtgcgccatttcctgctgaaaaaaagtttcatagtcatgcgttttcgtcagctgaatgctgtaatgagacggtgtatacgtttgaatgaccaccgttcccggcttttcatgccgcccggcccgtccgcttacctgcgtcagcagctggaatgtcttctccgcggccctgaaatcagggatgtgaagcgtcgtatctgcgcttaatactccgacgagcgtcacgttcggaaaatcaagcccttttgcgatcatttgcgtgccgagcaggatatccgccttcccttcaccgaacgctgacaacagtttttcatgggcgccttttcttgaagtggtgtccacatccatcctgatcacgcgcgcctgaggcagcactttggtaagctcctcctccacacgctgcgtgcccgtgccgaaaaagcggatatgttcgctgccgcattccgggcatgttcccgggacaggttcctcatggccgcagtaatggcatttcagcctttgtccgtagcggtgataagtcattgaaatgtcgcaatgcggacattgcggcacataaccgcagtcccggcacatcacaaacgaggaatacccccgtttattcagaaaaaggacggcctgctctttttttgcaagcttctcttccagctgttccatcagctctcttgaaaacattgatctgttgccgtttctcagttcttctctcatatcaacgagagaaacgtcaggcatgagctggcgatttacgcgatgttttaatggaagcagctcataaacgccttttttcgcccgcgcaaatgactccaatgtcggcgtggcgctcccgaggacgaccggacagctgtgatgctcggcccggcggatggctacgtcctttgcatgataccgcggcatttcctcctgcttataggaagattcgtgctcttcatcaataatgatcatgccgagattttcaaacggggcaaagatggccgatctggctccgacgacaagccggacttccttgcgctgaatcttccgccattcatcgtatttttcacctgtggataatccgctgtgcatgaccgcaacctgtgagccgaagcggcctttaaaacggttgaccatttgcggtgtcaacgagatttccggaacgagcacgatggcttcttgtccttttgccagcactttttcaatggattgcaggtaaatttccgttttgccgcttcccgtgacgccgtgaagcagaaagacgtgatggacatgatcggctacagcttgtttaatcggctcaaaagcggcctgctgctcttctgtaagagagagcggctctgtttttttgaacattctgtcctgataaggatcgcggtaaacctcctcaaagctttccgtaagaagcccctttttaagaagcgttttcagcgtcgcggaactggaatcggtctttttgcaaagctcggccgcggaaatctttgctcccccgccgataaaataagtaagcacggcgagctgtttagaagcctgctttgtcaatgaatctgcgtgccgggcgagttcttctttgtccgcccccgcttcgatcatgcggatcatttttttattcgttttttgggcgactttatatgtgacatcaatgcttcctttgcgcacgaatttttgaagtgacgaaagaatgctttcatcggtaatatccgagtacagaagacttttttgattcctgaaaagctgtttgatgtccggtgtcagcgcttcttcgtcaacgactttcagctctttctcgtacttcgccttcagtgcggcgggcagcattgcctgaagcgccgtgattttaaacgacagcgttttgtcagaaagccatgaagacagctgcatcagttcctcagtcagaacgggcgtcaaatcaagaagcttctcgacttccttcattgagccgccgtttaattcagacgaatctttcaaaccggtcacaaatccttgaagcttgcgcgggccaaacgggacaatcacccgcatgccgacttcgatcatcccttttaaatgatcgggaattttgtaatcaaagggtctgtcaatgtttttggagctgacatcgacaatgacttctgctacattcatacgggttttcggtcctcggctttcaaagcggtcatttccttcagcatttcaaaggaaacgtcaagtttagacataagcgcaagctcccgttttcttccgtcccggaaatagaaggtgacgacattcgtatccgtgccaaatccggccccttctgctttcacatcatttgcaacgatcatatcaaggtttttctgttcaagttttctgcgcgcatagcgttcgacgtcttgcgtttcagccgcaaatccgaccagcagctggtgtgttttccgttcgccgagttctttcagtatgtctgccgtacggttgaattcgatcacgagcgaaccgtctttcttcttcattttgtgatcagaaacagccgccggcgtaaaatcggccacggccgccgtcttaatcaccatgtcgcatgaatcaaacacagaaaacacggcttctctcatatcagctgccgattgcacaggaagaaactgatacagcccgactggcggctctattgacaccgggcctgaaatcagcgtgacccgcgccccgagacagacggcggcttcagcagcggcgtagcccattttgccggtggatttatttgtgaagaagcggacagggtccacggcttcgcgcgtcggaccggccgtaatgacaatatgttttcctttcagcggcgcatcgtcttcaggctccttaaaatgctctctgacacgctcaacaataagctccggctcctccagccttcctttgccgacatatccgcatgccaaatagccttcactcggctcgataaagcggaccccgtcctgataaagcacagagatgttccgtttcaccgccggatgatcatacatatggacattcatcgcaggcgccacccaaaccggggcctcagccgccagcaccgtcgttgtgagcatatcgtcagcaattccgttggcaagcttgccgatgatatttgccgtagcgggcgcgacaataattaaatccgcccagtcagcggcatcaatatgagatatcaccttcggattttgttcattaaatgtatctgtatatacttcattccggctcagcgcctgaaatgtcagcggagaaacaaactcacgcgcggactcagtcataatcactttgacgtttgcgccggcctgaaccagcttgctcgtgagtgcggaagctttataaacggcaattcctccgcttacgcatagcaaaatgtttcggtttttcatgaagtcttctcccctttatgaaagcattggacaaatcccaaacggaaaaaaataacaacctatgtagagataggttgctacgtgtgcttgttattcgctgtcttctctttcaaacgaaagcaggcccgcgtctatttcttctaaagctttgcctacatatttgtgagaaatggtatgttcaatctgctggtcttttttgatctgcatttcacgcgcgcgtcttgcagacacggtcaccagcgtatatttagaatctaatttattcattaaagagtcaattgacggatctaacataagttattctacctccagcattttcttatatctcggagcgacgcgttcacgttttaagtgctcggcgagaacgattgcgttaatcttatcacaagccgtttggatatcgtcgttttcaacgacataatcatacgcgtccatcatttcgatttcagcttttgcggcattcattctgttttcgattaaatcgtcggtttcagtccctcttgtcacgattctgtttttcagctcagaaagactcggcggcgctaagaagataaacaggccttccggaaatgcattccgcacttggagcgcgccctgcacttcaatctctaagaagacgtcttttccttcttgaagcgtctgttcgacataatcaacgggcgttccgtaatagttgccgacatattctgcccactcaagcagtttgttgttttcaatcatgcgttcgaattcatctctagatttaaagaaataatcgacgccatcgacttcgccctctctcgggtttctcgtcgtgactgaaattgagtattcaaatttcgtgtcctgttgtgaaaatattgcttgccgaaccgttccttttccaactccggagggacctgagagaacgattaataaccctctttctttcatgcggcaattacccctgcccttcatccataatttcttctttcacagaaagtctgtgtgcaactgtctcaggctggacggcagataagataatgtgatcactatccatgacgacaactgcacgggttcttcgtccgtatgtagcgtctattagcattccgcggtctcttgcatcctggatcattcgctttattggcgcagactccgggctgacaatcgaaatcatccgattggcggagatgatattgccaaatccgatattaatcagtttaatcgtcatcttctacgttccccctgtaaaatagacgtctctagtgtaacctgaagaggccgtctgtaaacaatacgcacagtcgctattctatattttgcacttgttccttcaatttttcaatagaacttttcatttcaacgacaagctttgtgatttgatgatcattggcttttgagccgatcgtgttcgcttcccggttaagctcctgaacaaggaaatcaagtttgcggccgactgccccgccttcttttaatatatcacggaattgaacaaaatggctcttcaacctggtaatttcttccgttatatcagaacgatcggcgaaaatggcgcattccgtgatcagcctgctttcgtcgagcgcatcctccgtccattccttcattcgggcgtaaagacgctcgcggtattgaataacaacggccgaagcgcgctctttcacctgttcggacagcgtctcaagccgctcaatgtgcagaaagcagtcttccgccaaaagccgtccttctttttccctcatgtcacaaagttcctttacagccagctcagcggcttccctgatgacttcttcaagcttgtcatcacgcatttgttcttcgtgtatctgcgcaatatgttcaaatttaaagaactccattgcatcgggttctgcggccaggctgtagcgctctttcatgacgcgtgcggcgctcacatattcatcaaggagctcccaatcgatgttcaggcttctttttatgagcgcgtcactgtttacagtgagaaacagctctactcttccgcgctgtatatgctgcaatatcgtttgtttcagcttatcctctacatatagcaaaggccgtggcaggcgggcgttcacttctttgaaccggtaattgacggatttcaattcaacggttgccgagagatcgccttttgtgctgcttgcgctgccgaagcctgtcatactccgtatcatatgaaacacccaattctttcccgttatcaaaataaaagggcaatagacatgctattacccctaagattatatcatatggaattatttttttcttgtcaaaagtgaacccgccagcaaaaaagtaggtatgcccgacataccgataatcagcatccaatcgcccggcgtaatcggcactgttttgaaaatcggctgcagcggcggataatagatgacgatgaccatcaggaagatagaagaaatgatggccccgagcagatagatattttcaaacggattccgggagaaaacagacgtttcgctccggcagtcaaacacgtgtataagctgagccaggacaagagtcgcgaatgcaacggtctgtgcgtagggcagattttcaggattgcggtgatagacgatgataaacgctaaaatggttgcagctccgattaaaaaccctcttgatacgactttccagcccagttttctcgcaaacactccttctttcgggtgccgcggcttccgcctcatcaggtctccttccggctgatccataccgagggccatcgccggcagcccgtcagtgactaagttcacccacagtatctgaatcggaacgagcggcagcggcagagcgagaagcatcgcaaacagcatcactaaaatttcaccgacgttggaggcgagcaaataccggacgaattttcttatattttcatagatattccgtccctcttttatggctgatttaatcgtagcaaagttatcatctaccagaatgagagaagaggcttcctttgccacatccgttcccgtcacgcccatggcaacgccgatatctgcctgctttatggccggcgcgtcattaaccccgtctcccgtcatggcgacgacgtgtccgttttcctggaacgctttgacgatttttaatttatgttcaggcgacacacgtgcgaagacgtagacatcatcgaccgtttcgataagttctttctccgtaagctcattcagcgtcttcccgtccatcacacgcccctttttcggaagaagacgcaaatctttcgcaatggcctttgccgtttcgacgtgatcccctgtgatcataaccgttttaatgccggcttcacggcattctttaatcgcctgtctgacctccggacggggcggatcaattatgcctgacaagccgagcatcgtcagatttttttccgcctgctccattgtcggtttttctccgggcttaagcggtttataagcaatcccgatcgtacgcaaagcttgcgacgccagctctttcagaaccgcttccgtttctgctttcttttctccagaaaatggcgcgcttcttgcgtcgtacatcagatgtgacgagcggtcaatcagcacatcgggcgctcctttagtgatgacgaactgctttttttcctgatcctctacaatgacggtcatcattttgcggacggagtcaaacggaaactcggcaaccacgcggtagtgcccgctgagccaatcgtttgaatagccgccctttcttgcagccgtcagcagcgctccttctgtcggatcgccgtcgagtacataatggccgtctttcagtgcgatttcggatgtgttgcacaacgcgccgaaaaccagcatctgttcaagaatcttctcatctttcggcttgatttcccgctcatctcgggtgaaaacgccctccggctcatagccgatgcctgacactttaaatgtttttccccctgaccacatatgggtgacggtcattttgttttgtgtcagcgtgccggttttatcagaacaaatgacagaggcgcagcccaatgtttcaaccgccgggagctttctgacaattgatttttgtttgatcatgcgctggacgccgattgataatgccaccgtaacaatggcgggaagcccttccggaatcgcggcgacggccaatgacaccccggccaaaaacatgctgtaaagctcatgtccctgtaagacgccgactgcaacgaccaataccgttaaaaggagcgcgacgataattaaaattttgccgagctcttcaagtcttcgctgcagcggtgttgaaaggctgccggcggattccagcatatcggcgattttccccattgccgtattcattcctgtaccgacgacgacgccgacaccgctgccgcgcgttacgatcgtacccataaacgccatattgctgatgtcgcctaacgaaacatccggctttctcagtttatcagcttgtttaaccaccggaattgattccccggtcagcgccgattcctcaatttcaaggcttttcgcttcaacgatccgcacatccgcgccaatccggtcgccgcttgaaaatttcatgatatcgccgggaacgagctccttggactgaattttcttccagctcccgtcccgcaacgctgacacatacggcgttgacagctcttttaatgcatgtaaagacttttccgcccgccgctcttgaaaaaaaccgagaaccccattgacaaatacaatcgccataatcgctacggcatctacatattcgcctaaaaacccggatattaaggttgccgccagcagcacgagcaccataaaatctttaaattgggcgaaaaacacggcgatcgccggtgtcctcttgccctcctgaagctcgttcggtccgtgcttttcaaggcgttttttcacctctttttcggtcaacccctgtttaatggacgtatttgttgctttcagcaaatcggtttgtcccatttcatgaaacttcattcttctcgtccactcccctgcctcgctttagagatgtcactctgtaaacaagcttattctgactcgtcccttttcatgctataattatcgaatgcaggaagaaggaaagggtgttttatatgtcttttgatggcatgtttacatacggaatgacacatgaattaaacagccggatcgccggaggccggattacgagagtccatcagccttttaagcacgatgtgatatttcatatccgcgctaacggaaaaaaccataaattattattatcggcgcatccgagctattcacgggtgcacatgacaaaccaggcctatgaaaatccgagcgagccgccgatgttttgtatgctgctcagaaagcatatcgaaggcggatttattgagaaaatagaacaggccggattagaccggattatgatattccgcataaaaagcagaaatgaaatcggcgacgaaaccgtcagaacgctgtatgttgaaattatggggcggcacagcaatattattctgactgacggagaaggagccatcatcgacgggctgaaacatttatctccgtcgatgaacagctaccggaccgttctgccgggatatgattacaagcttcctcccgctcaggaaaaaatttcgccgcttgccgcggatgaagaggacgttttgcgttatctcagttttcaggaaggacggcttgaccagcagatcgtcagacatttctccggtgtttctccgctgtttgcaaaagaagccgtgcacagagcgggcctcgctaacaaaataacgctgccgaagacgctgattgaaatgttccatgccgtgaaagattgcaggtttacaccgaacattacgacagccggcggaaaggaatacttttatctcctgtctctcacacatgtaaacggagaggagcgcacctttcactcactgagtgagctgttggaccggttttatttcggcaaggcggaacgcgaccgcgtcaaacagcaggctcaggatcttgagcggtttgtcgcaaatgaacggaaaaagaacgccaataagataaaaaagctggaaaagacgctcgactactcagagaatgcgaaggaattccagctatacggcgaactgctgacggcaaatttgtatatgctgaaaaaaggtgacaaagaagcggaagtcatcaattattatgatgaagaaagtaagacggtgaccatccctttaaatccgaacaaaacaccgtcagaaaacgcgcagatgtattttacaaagtaccaaaaggcgaagaattccgtcgaggtggtaaaagaacagatccgtctggccgaggaggaaatcgcttatttcgatcagctgatccagcagctctcctccgcctccacaaaggatattcacgaaataagggaagagcttgtggaaggcaaatatctgcgaccgaaacagcagcgaggacagaaaaaacagaagcagcacgttcctgttttggaacaatatgaatcttcacggggattgacgattcttgtcggcaaaaacaataaacaaaatgagtacttaacgacaaaagctgccgcaagggatgatttatggttccacacgaaagacattcccggttcccacgttgtgattaaaagcagcgatccggatgaacaatccatactggaggcggctgcgatcgccgcttatttttccaaggcgaaagattccggctccgttcccgttgattatacaaaaatcagacacgtgaaaaagccaaacggcgcaaagcccggatttgtcacctatgacagccagcataccgtatttgtcacacctgatgccgaccttgtcatacggctgaaaaaataaacacacctccaagctgaaatccgcactcagcttggaggtgttttttcttacgtataaacggagacgacactctcccagccatcagaaccgatctttacaatatctgatcagtttcccgtcatgtctgcctgatccgccggggaccgtcctctgattaaagcggtcacacctgatttggcggcggatactatcaccttccctcgtcaaacctgaacacatccggcccagttaatataatcatgccgggtctctgacctttcctttgtatgcgggcggaatccaggcggcattgggatcagatacatattccgcgtcacttcgcaatcctgaccgcttgccggcatataccgttcaaactgcccgctttcgttttgaattgttcacaatcggggactgtcaggacagtataaaaaacaccctgcctgagggactgccccccgtttttgagacaggggtcaaaacaccttttaaacagccaattgccgatagtttatcggtgattggttgtttagtttggtttgaatacgaatattgttataataatgaatgtattctatgacagtgcgttctacgatggcagtcgtagttcgatcaatgctgttaagatagaacgtttcagactttagcgaggaatgaaacgattcgatggaggcattatcagcgggcgtccctttgcgggacatgctcatggtaatgccttttgttttaacagctttttgatactcgtaagatgtatacacagaaccttggtcactatgtaacacgcagttctcaggcagcattggtagctgatcaagtgtgtctaagacaaaggctgtgtcctgcttatccccaatagtaaaagcaatcacttctccattgtataaatctaatatactggaaaggtacaattgtttctgtccataaggcaaatatgtgatgtccgttactagtttttcaagaggacgatcagactgaaagttccgatccaatatattatcgaccacggcatatggctgcccatccttcttgcgctttttcaccttaacccgacactgccattgatttttctgcataatacgttgaaccgttttatggttaatacacattctcttttttagtatggctgtgatttttcgatatccatatcgatacttgtgctctcggcacaacgtgccgatttgtttttccaaatggcgcttgggatgatccttcatcagattcttcttccaacgataataagacgctcgagagatacctaaatgaatacagatatcctgtacggtcattgtgctgtgcaatatttctacaagttcgactgacgtttcgctatcaacttcctttccaattcgttgtacttttttaaaacttcattctgttgtctcaggtaacgaatctctgcctgcagtttctctaaatcggaagaatactccggaccttttccgtaagtgtattgctttccaacaggctgttcgaatcgatgtgtatcaccagccttataccatctaacccatgtctgaacctgtgtcttattcttaatattcaactcctgcatgatctctttcataggtacgcctgccaatctcatttctacagccttctgtttcgcttcaaccggataactcactcttgtccccatagaaaaaacacctccaagtctaatttcggataacaatcatccgtattcaaacttgaaggtgtttttatttgtctcatcttatggggtcagtccctgatgacagacaaggtgttttttatggtcttcttcttttctcaaataatcgatccacttcttcagccaaatcagcagtaatgagatgctctatgtcctcagccagtcttttcgtatgtgccgggcttgcgccgcttgttgatacggatacttgaatgcgccctttgcggatgatcttcggcatatacacgctgccctgttcagcatcgcttacacaattgaccagctgcgtttcagaagcgctcgcggctatctcctgattcacgttgcggtcatttgtcgcggcaatgatgaaaaaagcgggcgcgagatccttcatttcaattttacgggaaacccagcggatgcgtccttcatccgccagctgtttaatttcgggcagggcatcgggactgattacagtaatatccgcgccttccggaagcaccgttttgagccttctaaaggcaacattgcctccgcccgcgatgataattctttttccgcttaaattaatgtgcagaggcagcatactgtccccccttaaaatcaaactgaccgccggggtttcgaacagcttctgacacacggttcaaaaacgcctgcttaatatgcgggtgaaaacctaagtatgaagcgagatgaacattttgattgaccgtttgaagcttttgaacttcccgttcaatctcagtcattaaaagcccggtaaacagaagatatggaacgttaaaaacgggtgctccgtcatcctcttcaaggccggcaaacacttctttatagtgcggatcacatgctgttaaaaaacaagggatgacttctttaacaggtgtaatcgcctcaagttttccggcaatctcactgactgcgttcttaactgccggatctgtgcttcctcttccgatcagcaccactttcgcctgctcaatgggcactccggtatcttcaatgcgatgatgcaccgcttttacgacttcatcgtccactccgatcggaacaccatatgtcacttttatatcgggatgcagggccgccgcacgggcgatttcagtcggaatgtcatgttttgcgtgggcagcggtcaacagcagtaaaggcacggccgcaatatgagtggcgccttgtctgacacatgcttcaaatcccgcttcaatagacggttcctgcagttctaaaaaacaaatttcctgaatgggagcgtcagcgtgcggcatgcacccttttaaaaacgccgccgactctgtctgcgcttttttcagcctgcttccgtgcccgatgtataaaatcgcctgcttcatttacaacgcctcgctcaaatccagatttttctgttcagatgcataccagtccagtttgcagtgataattgacgacatcgccgataacaattaagctcgggtttttgatttcttcttttatcactgtgtctgaaagcgtgccgacggtgcagacgactgttttttgcctgtccgtcgttccccaatgaataaaggctgccggggtgccggcgtctctgccgttttccagcagcattctttcaatctgccggatatttttaattcccatataaatcaccagcgtatcaatgcccgtcgccagcgctttccatttttcttcaaagtcgtcttcttgtttataatgtcccgtaacgaatgcgacattggagctcgcctctctgtgcgtcacgggaatgccggcataagcagcagccgcgattcctgatgtaatgccgggaacgatctcaaacggaatggcgttttgtgcgagagcctccgcttcttcgcctccgcggccgaaaacaaacgggtcgccccccttgagccttacaacggttttcccctttttcgcatacttcacaaggaaacggttaatcgtatcctgtttcataatgtgaaaatccgggagcttgccgcagtaaatcagatccgcttcttctccggcatactgtaaaatctctttgcttaccaatctgtcatataatataacgtccgctttctgtatggctttcattgccttcaccgttaataagtccggatctcccggaccggctccaacgataaatactttccccatagcatgtctccccgatccgttttgaaatcttcccagaacagccgcgaggccgcacttcagctattttaccatatcccgccattgcgggggatatccggctgattgcgcggcctttttggacctattatgctaagctgtttttcacaaagtcaaccagtcttccggtgcattcttcgcgttcacatttccctgaatcaagtacgagctcaggcgctttcggctcttcatacggcgagtcgatccccgtaaagaacggaatttcaccatttcttgcttttttatataaacctttcggatcgcgcttttcacatatatcgagatcgcatttcacgtagatttcattaaattcgccctctgccacaagctctctcacctgatctctgtcctcacggaacggagaaataaaagccgtgatgacgatggttccctgctgaacgaaaagcttcgccacttccccgatgcggcgtatattttccttgcggtcatcatcggaaaaacctaagtccttgtttaagccgtggcggatgttatcaccatcaagcacgatgacttgatagccttgttcaaacagctcgcgcgctgcggcgtttgcaatcgtggattttcctgaaccgcttaagcccgtcagccagaggatagagcttttatgcttgtttttctgctggtattcttctttcgttattgaggcttcatgccacacgatatcacgatttgtcactctattttcctccttaagaaacgcctgcttcttctttcgttttcagccctttaatcaacacctcgacaacttcaggacggctgaattccgccggcggcatgacgccgcttcgcagcatttctctgacctttgttcctgacagaatgacgtggtcttctctgtcatgcgggcatgttttggccgttcccatgttgccgcatttctggcagaagaagctgtgctcgaatttcatcggtgtaatcccgagttcatccgctgtaaattgatcaaacagctcttgcgcttcatatgtgccgtagtaatcaccgacgccggcatgatcgcggccgacgataaaatgcgtgcagccgtagtttttgcggacaagcgcgtggaaaatggcttctctcggccccgcataccgcatagccgccaaaaatacgccgaggaacacgcggtctttcggataataatgatcgagcagcacctggtagctttccattctgacatccgccggaatgtcatctgattttgtttcaccgacgagcgggttcaaaaacaggccgtcaaccgtctcaagcgcggttttttggatatattcgtgggcgcggtgaaccggatttctcgtttggaaaccgacgatggttttccagcccttttcttcgaagcttcgtcttgtatcggcaggttcaaatgtaaactcgggaaactgctttgacgcttttttaactaatgtgatcggcccgccgacatacgtatcgccgcgtgaaaataattttttcacgcccggatgcgcggcatcatcggttttatatacgtgaacggcttctttttgtttatccggcgtataaatatcttcgatgtcgactacgccgtatgtttctccgccgtaagtcagtttcaccgtgtcgccgacggcaagctcagccgctttatctgaatcgaccggaagcgtgatcggcagggaccagacaaccccggatgccagacgcatattttcaacgactgacacgtaatctttttctgtgaaaaatccttcaatcgggctgtaccccccgatcccgatcagctctaaatcagcgaacgaaatcaaatcaagctcaatttctttttggacggatgtaagatcatactgctcatttacccgattaattaatgttcctccgtgcggtgctaaactcataatacatgattcctcccagttaacagataaataaactcagattaatagttaaatgcctccgccttgttcatggacagagcgtttctcttttcggatggctttcatcagactggcggctccgccagctgccaaaagcacgctggccatcataaagatggaatagtaatctccttttaacagcagggagacaagcaaatacgaaatcgacagtgacaaaaacggtgaaacgacccatactttgagcatcgttttcacgacttctttatgaaaaacgttcggcccgtttttggccattccgataccgataattgatgatgatgtgacttgcgccaatgggaccggcagaccgaagacggaactgataatgacaagccccgcgccggttcctgaaagcagtatgccttctccggctgaaaatctcgtaatctttttcccgttggtttcaagcactttgcgtcctaaaagcagagcgccgagagcgacaaagatgcctccgtacagcgttcctttggacacgctgagcacgcccgcagcaaccaaagggcccaccgcatttgcgacattgttcattccggctgaaaaagcttcccaaaaccccgcaatcagcagcacaatccctaaaatcttctgtttccgactcgaaatgactcgaatattcagagaactgaataccttcgagacgagaaacgtgaaacagaacgcgacgaacggtacgagcacccaaaaaatcacgatgactaaaagatgctgtaaaaacaatactttgtacgcgacgccgacaccgacaatcgccccgacagtgacctcactcgtcgacagcggaatgccgagcacattcgccgtgaataatgatagcgccgccgatccgataataatgcagacaatggtgagcgaaatggtttgttcgggaatgattccgccgctgatcgtcttaacgacttcaccgccgccgataaccgcccctgacaggactccggccgcgcagatgatcagcgcatacgttttctttttaactgcgccggacccgtaagcgactcccattgaagccgcggctccgctggctccgatattcatggcaaaaaacaggcagaataaaatagcggctaattccatcgtgcagctcctttattcatgcagtccgcattctgttttcgccatgccgttccatctgccgctccgcaaatcttccgcggtaaacgcaggtgaagtgcacggttcacagccgatgctaggatacccctgatcgtggaggatattgtaatccagctcatgcttggaagtatatctccagatgtctttccatgtccaatggatcagcgggcatactttaatcgattgaaacttgtcgtctttattcaggaaattcgtattcgcccggctcggcccttgatcccggcgaaggccggacagccatgccggatgccctgcgagcgcttctcttaacggcagaatttttctgatgtagcagcactggttcggttctctttcccacagtttatctccgtgagcctcggcctgttcttcaagagtaaggcttggctttttcaggataatgttcagtcccgggtaacgctctttcactttttcgatcgtttcatatgtttctttaaagtgaagacccgtatcaagaaacacgatttccgcgtctttctttactttagaaattaaatcgatcaggacgatgccctcaatcccgaagctgcacgcgtaaacaagctggtctccgtagtggccgtatgcccattttaaaacggacagcgcgcctttataggaatcgtcttccggaaatgtaatcgccggctcttcccatgtgtcatacgttagcatttttcctttcctcctcccggagacaatcaatcagctgttgttttctgccggttgtcttatccctcaatctttttttcatataaaaaactttcaatccagcggaatgaaagacagtgacccggtatagcccttatcttcaaaatgctgtgcatttttctggatgcggcaccttgcatgacacgcaggttgccgggcgtcatcggtccagtccctcagccgctcttgataagctttttagatttgtactaaattttagcacaattctaacagaagtcaacccgagttttttgataggaataataaaacaggccctgaggcctgtttttattgtcattattttttaaaccaatcttttgactcgggattctgtttccatgatttcagtttctcaatgtcatctgaatgaatcgttccgttttcaagcgcgacttcaatcagcgtgtcataatccgttaacgagtaataaggaagacccgcttttttaaaggcttcttttgctttcggcagtccgtatgtaaaaatggaaatgacgccgaggacttccgcgccctctctttgaagggccgctgcagcttcaagcacgctgcctccggtagaaatcaagtcttcaatcacgactgttttttgcccttttttaatggcgccttctatttgatttcctttgccgtgcgctttcggtttgcttctgacgtagcacatcggtgcgcctgcacggtctgcgagaagcgcagcatgcggaatgcccgccgttgcagtacccgcgatcatctctgcctcgggaaaatgctctttcagcagtttgccgagcccgtccgccacatcatttctcacttttggatacgacaatgtcagacggttgtcacaatagatcggtgataaaatgccgctcgcccacgtaaacggctcattcgggcgtaaaaagacagcttcaatgtgtaatagatgttttgcgatagcctgtttcatcggcgaacgccctcccattccagtttaattgcttcatatgcttcaacggggttttccgcttttgtaattgagcggcccacgacgatggctgacgaaccgttttctttcgcaaatgacggagtcgccgtccggacttgatcgtcagctgcgtcactggccgtgcggatgcccggtgtgactgtcagaaatgaaggccggaccgcttcataaatggcttttgtttcatgtaccgaacataccactccgtccagcccgcactcttccgccattttgccgtaatgcacgaccgtttctaacagcggcttatgcagcagaagctcttccttcgccacctgctctgaagtgctggtcagctgagtcaccgcgattaaagacgggcgttttctgcctgccggcgtgccttcttcaagcccctcaagggccgcgcgcatcatgcgtgcgccccctgccgcatgcacattgacgagatcaacgccgaggccggccagccgcttcatcgctttattgaccgtagtcgggatatcatgaagctttaaatctaaaaatatatcacagttccgttcttttaattggtgaatgatggcggggccttcctgataaaaaagttccatcccggttttgacaaaaagcctttccttttcaaacaagtctaaaaacgttaaagtctcttcccctgatgcaaaatcaagcgcgatgatgggcaggttgtttttcatgtttccagctccttccgatgcattcacttacagattgaaagccgtgttggctcagtacacgggggagctgttctatgatttccgggcagacgaacggattgacgaagtttgccgtgccgacggcaaccgcactcgctcccgcaagaagaaattctaatgcatcctctgcggtctgaacgcctcccatcccgataatcgggatttgaacggcctggctgacttcgtataccatccggatggcgaccggtttgatcgccgggcctgacagtccgcccgttttatttgctaagatcggccgtcccgtcttgagatcgagcctcatcccgatgagtgtattaatcatcgtcagaccgtcagcaccggccgcttcaatcgctttggcaatttcggttatgtttgcgacattaggcgaaagcttcacatacacaggcactgcggaaacttctttcaccgcttttgtcagttcggccgccatgacgggatcagtaccaaaagcaatcccccccgttttgacattcggacatgaaatgttaacctcaagcgcatgcacattcggcgcttggctgatgtgctcggccacttctttatagtcgtccacctgagaaccggcgacatttgcgataatcggtgtgtcaaattgttcgagccaaggcagctcatggttgagcacatgctcaaggccgggattttgcagtccgatggcattcagcattcccgcgcttgtctccgccactctcggcgtcggatttccgaagcgggcttcgttcgtcgttgctttaatcataatgcctccgaggcatgataaatcgtaaaatccggcatattctttcccgaaaccgaaacatccggaagcggggatgatcgggtttttcaattggagacccggcagattcacctctaacattacagcgccacctcctcagctttaaataccggcccgtcaaggcagacctttacataggatgtatcgctttcacccgtacggcacacgcaggcgaagcaggctccgatgccgcagcccatccgctcttccatcgaaagataaacctctttatggccgtactgctgcttcagagctttcagcatcggtgtcggtccgcagcttagcaggacatcgaattcgagctgcttttcacggatgacatcggtgacaaaccctttctctccatatgtaccgtcagccgttgccacataggtgtctccgtacgcacgacattcctgttcgtaaaaaacatcctttgctgattgaaatccaagcacatgaatgacgtttacgcctttttccgtcaggcgctttgacagttcctgcaaaggcggaaccccgactccgcctccgactaacagcgcggttttgccgggttcaatccgccggacggggaatccgttgccgagagggccgagaacgtctatcctgccgccctcttttttctcggacaaaagacgcgttccctcaccgtcagctctgtagataacggatacttcattcgcggcgaaatcgacgtccgcaatgctgagcggtcttcttaatagcggcgtgaccgcgtcactcaccttcagatgtagaaattgacccggctcggtaaggtgccggacaagctctcctttcagcaccatcttataaatccggtcggcaatttctaagttggattgaacagtcaaatgcgcttttttcatatcgtggctgccgccttttgattggtttcggatgcaggcatatgatccgcccggaatgtcatgctttccaatacccgcaaaatggcttcagccgtatctaaagatgtcaggcaggcgactccattctcaacggattcgcggcggattctgaagccgtctctggccggctgtttgccctttgtcagcgtattgatgacaaattgcgcttcgccgtttctgatcacatcgagcagatttttcccttcttcgccgatttttccgacgacttgagccggaatctgagcgtctttcaaataagccgccgttccttccgtcgccaagattttatagccgatggcgtggaaccgcttcgcgatcagcagtccttcttctttatctttatcggcaacagtcaacagcactgagccgtagttcgggatttgaatgccagaagcaatcagcgctttatagagcgctttttccagggttgaatctttgcccatgacctctcccgtcgacttcatttcagggcctaacgtaatatctactcttctcagcttcgcgaatgagaagacaggcgctttcacgaataccccctgctgttcaggctgcagcccctcttgatagccgaaatcagcaagcttttggccgagaatgacctttgtcgccagattcgccatcggaatctttgtgattttgcttaagaacggcacggttctgcttgaccgcggatttacctcaagcacatacacttcaccttgcgacagtacgaactggatgttcagcaacccgatgatgttaaggccttttgccaaggctacagtgtattgttcgatttttttcttaatgtcttcgcttaaagactgaggcggatagacggcgattgaatcccctgaatggacgccggcccgctcgatatgctccataattcccggaataacgactgtttcgccgtcagatacggcatcgacttcgatttctttccccgtcagataacggtcgattaacaccggatgctgcgggttgattttgaccgcatttttcatatagtgaagcagctcttcttcgtgatagacgatttccatcgcccggccgccgagcacatacgaagggcggacaagtaccggatagccgatggatgcggcaattttgaccgcttcgttcaccgacacggcggtttttccgagcggctgcggcacattcagcgcctcaagcgcctgctcaaacttatcccggtcttccgcacggtctaaatcttcaagtgatgtgccgaggattttgacgccgcgggcgctcaattcttccgcaagattaatcgccgtctggccgccgaattggacgacaacgccttccggctgttccaaatcgatgatgtgcatgacatcttctaccgtcagcggttcaaaatacagtttgtctgatatgctgaaatcagtggacaccgtctcagggttgttgttgataataatcgcttcatagcctgcctgcttgatcgcccagacagaatgaacggtcgcatagtcaaattcgacgccctgtccgatacggatcggcccggaaccgaggacgacgacgctttttcttgatgtaacctcagactcgttctcttcctcatatgtgctgtaaaagtacggggtttctgattcgaattccgccgcacatgtatccaccattttatatacaggcttgatgtctgcttcttttcgcatttgatacagctcttgttccggcatattccattcccggctgatatatttgtcggagaaaccgagttccttcgctgtctgaaggacggcgaggctgcctttttccgctttcagctctgtttcaaaagcgaccagcttacagagcttgtgcaaaaagaatacgtcaattgcggaaaactcatgaagctgctccactgtatagcctcttctgaacgcttcagcaagataaaacaggcgttcatccccggcttttctgatccgtttttccaaaagtccgtcagaaatctcttccgcatccttcagttccaggtgatagacatcggcttcaagtgagcggaccgcctttaacagcgattcttcaagggtgcgcccgatggccatgacctctccggtggctttcatttgcgttccgagcctgcggtttgccgactcaaatttgtcgaacggccagcgcgggatcttagaaacgacatagtcaagcgcgggctcaaaagccgcatatgttttccccgttacgggattcatcatttcatcaagagaaagcccgactgcgattttcgccgcaagctttgcgatcgggtaacccgtcgcttttgaggcgagggcagatgagcggctcacccgcggattcacttcgataatgtagtattggaagctgtcgggatcgagcgcgagctgaacattacagccgccttcaataccgagcgcgcggatcagctttaatgaaacattgcgcaaaagctgatattcccggtcgctcaaagtctggctcggggcaacgacgatgctgtcgcccgtatggatgccgaccggatcgatattttccatgttgcagacgacgatcgcgtgatctctgctgtctctcatgacttcatattcgatctctttgtaaccggcaatgcttttttccagaaggcactgatggacggggctgagttttaatccgttttcgacgatctctttcagttctgcttcattcgagcagatgccgccgcccgttccgcctaatgtgtaagcggggcgcacgataaccggaaacccgatccggccgacaaattcctcggcttcctgtaaagtgcggatgatctcactttccggcaccggttcattcagctcattcatcagcgtacggaataagtcgcggtcttccgcctgctggatggcggacagctttgtgccgagcacttccactccgcattcctcaagaaccccgagttcagacagctcgacggcaagattcagtccggtctgtcctcccagagtcggcaggatggcgtccggccgttcttttctgataatacgcgtgagaaactccggcgtcagcggctctatgtatacccgatcagccatttccgtatccgtcataatcgttgccggattcgagttgacgagaatgacttcatagccttcttccttcaaagcgagacacgcctgtgtgcccgcataatcaaattccgccgcctgtccgataataatcgggcctgatccgatcactaaaatctttttaatatctacgcgttttggcataccgcttccccttctttctcagttgtttcgatcaagtcaatgaatctgtcaaataaatgattggcgtcttccggccccggtgaagcttcagggtggtactgaaccgtaaatgccggcaatgttttatgcttgagtccttcgatcgtttgatcattgatcgcaatgtgcgtcacttcaagctctgtctcatctattgaagaaactgtatatccgtggttttgggcggttaaagcgactttccctgtcgcaagctctttaaccggatgattggaacccctgtgtccgaatttcattttttccgtttccgctccggatgccagtgcaaataattggtggccgaggcagattccgaataacggcaccttcccgagtatgccttttatcatttcaatggcttccggcacatctttcggatctccgggtccgttagaaagcatgatgccgtccggcttgagctgaagcacttcttccgccgttacattgtacggcacaacgatgacatcgcattttcttttgtttaactctcttaaaatgccatgcttcataccgaaatcgacgagtacgatgcgtttgccgcggcccggactcggatatgccgttttcgcagatacttgagcgacttgatttctcggcagttccgtttctttcagccttgcaagaacctctccgacattctcctcacttgaagcaaacgttccttttaatgcgccggccgtgcggatcattcttgtgagctttctcgtgtcaatcccttgtaagccggggatatttttcattttcaaatactcgtcaagcgtgtaagccgaacgccagttggaaggcagctcgcacagttcttttacgatcagcccttttacaaaaggagtgatggattcaaagtcatctctgttaattccgtagttgccgatcagaggatacgtcagcgtcacgatctgcccgcagtaagaagggtctgataaaatttcctgataaccggtcattcccgtgttgaatacgacttcacccgcggtatgctccaggctcccgaatgcttcaccctcaaataccgctccattttccagcactagtcttcttttcatttgacgagtctcccttcttcgtatgcaagcttaccggcagccatcgttgcaacaggccagccgaagcacttcatcttgttgaatggcgtattttttcctttagataaaaatgtatctttgtcaatggctgcttctttttccagatcaatcagggtgatgtcagccggcgcccccggtgcaagcgttccgtacggaagatcaaatgcctcgcaaggttttaccgtcatgaaatcaaccagctgcttcagcgtccacgccccgtttttcacaaaatgtgtgtacagaagcggaaaggctgtttctaaaccgacgatcccgaaaggcgcaagcttcatatccgtgtttttctcttcttctgtatgcggcgcatggtcagtggcgatgaaatcaatcgtaccgtctaaaagcccttcaatcagcgcctctctgtcctctttgctgcgaagcggcggattcattttaaaattggtatcaagtcccgggatatcttcgtcacaaagcagcaggtggtgcggcgacacttccgccgtcacgcggattcccgctttttttgcgtctcttacggctctgaccgattctttcgtgctgatatgacacacgtggtaatggcagcccgccgcttccgccagcaggacgtcacgggcgatgtgtaccgcttcacaaatggaaggtatgccgttcaggccgttcgcttttgaaaaagaaccttcatgcacgctccctccgtaaataagtgagttatcctcacaatgagcgacaatcgctttattcattgaagccgcccgtttcatggcttcatacatcattccggccgtctgaacgccgacgccgtcatcggtgaaggcgaatgctccggcttcatgaagcgccttaaaatctgtcatttcttcgccggtttgcctgatcgtaatggatgcgtaaggaagaaccctgacagatgaggtttctttgatccggttttgcagccattccatctgctctttcgtatccggcaccggtcttgtattcggcatggctgcgactgtggtaaagccgcctcgcgccgcggctttagagcccgtctcaatggtttcttttttctcgccgcccggttctctgaagtgaacatgaaggtctacgagtcccggtgaaacgaacagtccgtcagcgtcgatcaccgtttctccgtctttcgctgtcagaagcccggtttccgaaatgaattcacccgttacccggatatcctgtgccactttttctccctgttcatttaacatccagccgttcctaatgagataagacataagccgcttctccccttttcacattggtttgcagtgctctttttaagactgccattctgatatacacgccattttccatttgtttaaagattcttgattttccgcattccactaatgttgtgtcaatttcgactcctctgttcaccggtgcgggatgcatgatgatggcatgccgcttcatgctctccgcccgctttgcggtcagcccgtatgcttccaggtagcctttttggtcggcttctgtctgatgcctttcattttggatgcggagcagcatgacgacatctgaagcttgtatggcttcatccgtctgtacacaggtgccgaaggcgtttttctcatcctgccattgcggcggaccagaaaacagcacgcgtgcgccgagccttgtcagcacctcggcatttgaccttgccaccctgctgtgtttgatatcgccatgaatggaaactgtcaggccctgaaaggtctcaaattcctcttgaatcgtcattaaatcgagcaatgactgagtcgggtgctggccgcagccgtcgccggcgtttaagatcggaatattgactctgccggtcagatctttgtaatattcatccgtgctgtgcctgatgacgcaggcgtccgctccgattgattccagagttttgaccgtgtcgtataaggactcgcctttttgaacgcttgtgctcgtatcgtctaagctgagcacgttcatcccgagtttcttttccgccacttcaaagctgaaccgcgttctcgtgctcggttcaaaaaacagattcgcaacaaattttcccgcgagatcggggcggactgttccctcttttatcgcttttgcctcacgcagcagttctgtaatttcagctgcgctcagttcagacatcgccgttaaatgattcatgtttttctcctccgtttccgcttgaaggccgtaaaaaaacaccccggtctatagactcggggtgcggttaaagagagaagcagcgtacagcttcttcccgttataacccttccaagcctctctggactttctttaaaaggtttcacatatgattttgtttttctgatgcaatcgcgtcttcttcatttgcatgcggcaggataaggttcaggatgactccgacgattgccgcaagcgccatgccggatatttggaacccgccttttgatacttgaataaaagcccctccgacaccgatcacgaggatgacggatgtgataattaaatttctcttgttttcataatcaatgttgttgtcaatcagcattcttaagccgctggaggcgataattccgaagagcaggaaggaaacgcctcccataaccgcggacggaacagagctgatcagcgctgatacttttccgataaatccgaagcacagcgcaatcacacccgcgccgccgatgacaaagacgctgaaaactctcgtaattgccaggactccgatgttctcgccgtatgtcgtcgtcggcgggccgccgattaacgaagcgatgatcgtcgcaacactgtcccccattatggagcggtgcagtcccggctttttaatgaaatcctgtccgacgactttactcagcaccatttgatggccgatatgttctgacatcgtcacgaaagcgaccggcaccatcgcagccgcaatgcccaatgtcactgacggcgtatagtctttgaaagggatgataaattcaggaacggcgaaccactttgcatcaatgaccggctgaaaattgacgatgccctgtgtcagcgcaaacagatagccgcctataatgccgatcaataccggaatcaggcttaaaaatccccgtaaaaagatggcgcagataatggtgatggccaaagtgacgccggctacactgaaatgtttcaagctgtagacgagttccttcgcattcggatcagcatacattgccatattgacggctgtgcttgccagtccgaggccgatgacgatgatgaccggcccgacgaccaccgggggcagcagcttcatcagccaccccgttccaagctgcctgatgagcagtgcgatcaggccgtacacaattcccgccaggaaagcgccgaccatggcagcccccggccctcccgtcgccttcaccaagataatcggtgatataaaggcgaatgatgagccgagataagcgggaatctggccttttgtcaccaagagataggcgagtgtcccgattccgctcgtgacaagcgccactgccgggctcattccgaccagtttcggcacgagtatggttgaaccgaacatggcgaataaatgctgcaggctgaatgacagccaagacaatggattggggacgtccctgactcccaggtttacttttttcttactcatggcgttttcctcccggttgactttcaaatggtataaaaaaacctctttgcttttggcgcaaagaggcatacaaaacccggccgcgtcgatccgcccggctttgtgttttaaaatcctctttgcaaactctctggaatgcatttaaaaagggtgattattcattttcgtaaatggcgaccatatcagtctgatcaacttcgctcagctgaaccattactttttcagcttttgaggtcggaatgtttttcccgatatagtccgctctgatcggcagctcccggtgccctctgtcgacaagcacggcaagctgtatcgatgacggccgtccgacatcaacgagggcatccatcgccgctctcaccgtccggccggtataaagcacatcatcaaccacaatgaccttttggtctgtaatatcggccggaatgtccgcgccttttacaagcggctcttcattgctcgtttttttcgtgaggtcgtcacggtaaagggtgatatcgatttccccgacggtgaccggattcccttcaatctgttcgatccgctcggccagccgcttcgctaaataaatgcctcttgttttaatccctacaagaatgcagtcattcattcctttattccgttcgatcatttcatgggctatccttgtcagcgcccgcctgatcgcctgttcgtcgagaataacagctttttgattcactcgtgacacctctccattcgtatataagaagaaaaaacccctctgccagagcatagaggggttcctttccaggacgaagacacacacgtgtatctcttctgtcctatccgttatccttctcagcctctctggactgtgttaaagaatctattcagcttgtttttattatttcagaaaagaaagtcgctgtcaatggctatttcttaaatcttcaatgagttttttcatatcttcaggaaggggcgcttcaaactccatgtattcgcccgtccgcggatgatcaaaacctaatattccggcatgaagagcctgaccattgaaatcaatggtttttctcggtccgtacttcgggtcgcctgccaaaggaaacccgatatatttcatatgaacacggatctgatgcgttcttccggtctcaagacggcactctacgagcgtgaaatcttgaaaacgctcaagcacgtggaaatgcgtgacggcgtttttgctgctttctcttgttacggtcatgctttgacggtcttttttatctctaccgatcggagcgtcaatcgttccgtcatcatgtgaaatcaccccgtggacaaccgctttgtactttctggtcacggttttattgacgagctgattaacgagtgattcatgcgccatatcgtttttagcgaccattaacagaccggaagtatctttatcaatccggtggacgattcccgggcgcatgacgccgttaatgccggaaaggtcgttgcagtgagccatcagtccgtttacaagcgtccctgtcacatggccgggcgccgggtgtacaaccatgccccgcggtttgttcacaaccaagacgtcctgatcctcatagtaaatgtccaaatccatcggctctgcaagcacgtccaattcttccggttcaggaatggtgacgtttacctgatcgccgggctgcattttgtagttcgcttttacggatttgccgttaacggataccaatccctcttttacccattgctgcacttgagtgcgtgaccagttttctcccgttgaagccaaaaatttatcaatccgttcgctcttttgttcaggctgaacggttatctcaaattgattcatgttattgctccttctttttcccgctgtcaaacagcatatgaataaataaaagtattacaccgacgcacagtgaggagtccgcgatattaaaaatcggatagtgataatccacgatgatgacatgaataaaatccaccacttcctggcgcgccgcccggtcaataaagtttccggccgcaccgcccagcattaagccgagagaaattccgagtaacatctgcccttttgcataacgctgtatgtaataaacgattccgataatcacggcgatggtaatgacgtagaaaaaccacatttggccggctaaaatcccccacgccgctcccgtgttgcgatgagatgtgatataaagcacctgatcgatgacaggtatgctttgtcccaattccatatggctgacgacaagccatttggtcaattggtcggcaataataataaaaagagcgataagataataaagcacacacgttcctccagtatacagttacttttatcctttatgaattttatcagtaaaagatgccagagtaaaggcagatcataagcgcatgcaaacagacgctgtcactcatacagcgcctgatcatatgcataatctccgggttcccaatatggaagggttttcttttcaaattgagcgggataataaaaatcatcagcggttctggccgtcggcagcaccgcaagtttttcaatcggaatgggggcgcctgttttttcacaataaccgtacgtattgttttcaaacttagacagggcaagaagaacgtcctgaagttcttcttttatatgatagatcagagttgcttcttggtcgttcattgaaggttgaacagatgctgacatttgaaagcaagaatattcgaataatcttgattgaagttcttctttcatcatgagaagctccgtgtggattgcggtcagttgatcattcattcatcacaactcctgctcttgatgttatggctttattgttgcccccagagcgtcatttgaagcccataagatttttcctgtcgttctaatcgatgacattagtggcatgtaaaaaagcgcccggctgacaccgggcgctttctcattcattatttttgataatatttttcaacgatttccgcattgcgcagtgatagtgtcggatatttcggattggctccgacatctttagaaattacgcgggaacgttcacacatctggccttccgctttttctacggtcatttttcctgttgtgaagctttgcgcgttttccggtgcttcactttcgtctcttactgtcagttctgagacgataaacagctgcgcgatattttctttaatggatgacaagaggtcgcggttttctttgttcggatacaaagtcaggctcgcttccaatgatcttccgataattttttcgttacgggctgtttccaaagctttcagcacgtcgtttcgaagctccatgaagcggtcgaacttttcttctgtcgcttgactgtccggaacagcaatggtttccggcatatctgtcagctgcacgcttgcttcttcaacaaatgataagtgagaccacatttcatctgccgtgtgcgggagaatcggcgccgtcagcttcactaacgccagcagcgtttcatagaagacggtctgcatgctgcggcggtccggatgatccgcatgctcgatgtacacaacatcttttgcaaaatcaagatagaaggagctgagctcgatcgtacagaaattgtgaatgctgtgataaacaaccgcaaattcatattcatcgtacgcttttttcaccttatcgatcagcttattcagcttgatcagcatatattgatccacttcgcggagatcttttacatcaacggcattgacgcttggattgaaatcgaacaggttgccatgaaggaagcggaacgtgttgcggactttccggtatacttccgcgacctgcttcagaatatcttcagaaaccgggtgatcggcctgatagtttacggaagatacccataaacgcagaatttcagctccaagctgttttgcgatttttgtcgggtcaatcgtattgccgagtgatttactcattttacggccgtttgcatcaagtgtaaatccgtggcttaatacgcctttatacggtgctttgccggtgactgcaacagcggtggaaagagatgagttaaaccagccgcggtattggtcagagccttcaaggtataaatcagccggacggacaagatcatcacgttcttcaagaacagcctgatgggaagaacctgaatcaaaccacacatccataatgtcttgctctttcgtgaagattccgttcgggcttcccggatgtgtaaatccttccggcagaaggtcttttgcctctctttcaaaccagacgtttgagccgtgctgtttgaacagctcagacacgtgttcaatcgtttcgtcagtgatgatcggctcaccgttttctgcataaaataccgggatcggaacgccccagacgcgctgtcttgagatacaccagtcaccgcggtcgcgcaccatgttgtaaaggcgctgttcgccccactccggcacccacttcgtttgtttgatggcatcaagcagatcggatctgaaatctttaattgacgcaaaccattgcgctgtcgctctgaagatggtcggttttttcgttctccagtcatgcggataggagtgtgtaataaactcgagtttcaagagcgcgccgttttcttcaagcttctccgtgatcggtttattggctttatcgtaaaacattccttcaaagcccggcgcttcgtcggtcatgtttcctttttcatcaacagggcacagtacttctaagccgtacttttggccgacgataaagtcatcttccccgtggcccggggcagtatgaacacagcctgttccggcatcggttgtgacgtggtcaccgagcatgacgagtgaatctctgccgtacagcggatgttctgcagtgatgtattctaattctctgcctttatatgatgcgacaacttcgggattttcaaagccgcatgcctccactacgttttcgatcagttcagctgccactacataacgcttgtctccaaccttgatgacattgtattcaagatcaggatgaacggaaattccgaggttggcaggcatcgtccacggcgtcgtcgtccagatgatgaagctttctccgttttccagaacgcctttaccgtctttcaccttaaacgcaacataaatagacgcggaacgtttgtcctgatattcaatttccgcttctgctaaggcagattcactggaaggcgaccagttgaccggcttcagacctttataaatatagcctcttttcgccatctcgccgaaaacgcggatctgctgcgcttcaaattcaggctgaagcgtaacatacgggttttcccaatcgcctctgacgccgagacgcttgaattgttcgcgctgtctttcgatctgctgccatgcataatcttcgcaaagcttgcggaaatcagcgacggacatttctttccggtttacttttttgtttttcgtcagcgccgtttcaatcggcagtccgtgcgtatcccagcccggcacgtacggtgcgttgtagccgctcattgatttatagcggacgatgaagtctttcaggattttgttcagggcatggcccatgtggatgtctccgtttgcataaggaggtccgtcatgcagcacgaatttcgggcggtctttcgtccgttcttgaacaagacggtaaatgtcctgctcctcccagtctttttgcatgtccggctcacgatttggcagatttccgcgcatcggaaaatctgttttcggcattaacagcgtatctttgtaatccattctcattcctccacaacatttttcagaaaataaaaaaagccctctcatcccataagggacgagaaagcttatctcgcggtaccacccttttagaaaaaacggatcatccgtcttttcctctcgaacatcgtaacgtgatggaacgtcctttcctactctcggttcagaaaggaaactaaagggctgatctgcatgattccggccatcccgggctttcaccttccccgggtcgctttatagcctgttttgagtcatgccggtccctttcaatcgtcttttcatctgaatttatgaacgtattatattcgaacgggccggagaatgtcaagaaaatcagaaaattattctttttcctcaaataccgcgtcgacttcgtattccagcagatgatcccaatcatcgttcttcagcagatcgagctgcgcttcaatcagcatttggaaacgtgttctgaagactttagactgttttttcagctcttcgatttccattgcgatttttcttgatttggaaagcgactcattgatgatgcgatcagcatttttttctgcttcacggacgatcagcttcgcttctttctgcgagttgcgctttacgtcttctgcggcttcctgggctacgagaattgatttattcagcgtttcttcgatattggcaaagtggccgattttttcgtccagctcgttcactttcgcctcaagctccgtttttttacggagtgcgatttcgtaatcttttctgacctgcattaaaaattcatttacttcatcttcatcatatccgcgaaaaccttttgtaaacgttttgttatggatatcattcggcgttaatggcatattgccacctccatttttacatttcagtacggttatctagttcacattataaaacaaatacggcacagatggagaaaaaaactgaaaaaacgactcatttttgccgttcaaatgtaactttccatttgtcttttttcgtttttccgtcaacttttgccaaactgcatcgtccgaagccgcgaatcgagagcatgtccccttcagcaacctgataagacggatcttcaatggctttccaattcaccttaacgagcccgtttttcacatgcgcctgcgctttctgccgggattgcctgctcattgaagcgcagacggcgtcgagacgcaatgaagaaaccgtgtcatcccttatttcgacatctgaagcggggatgtgaagagcggaaagctcgattttctcaagctttaccggcgctttgcccgccttggtcagctgagcgctgacaaaatcggcgatttcaccggagacgatcagctgcacggcttcctctgagaaaatcagatcgccgtatttctgccgctttaagccgatccccattaatgatccgagaagagagcggtggtcaatgctgacgaatttttcagcgtattgaacgtcaaaagcccgaagctcaaaatcatcctgttcaggttccatatattcagggtataaaatcgcgcgtttgcgctcagctctgtcatatcctccgaaaaacgcaagaccgcaggcgtcgccgataacggcttttacaatgacctgttctctgggatctaagaaatcagtcagcttcatccgatactggtccaggacaatctgtttccattcaagcgcctgatcaataaaaggccgctcgtcttgtctgaagtgctggtaaatatcgctcatgttctttcctttctatgtaaagaggcttggctggtgccaagcccatatcaaactgtcgcattcaagtatacattgcgatcatgcggtataggccccaaagtcccgtcgtggcaaaccgaagcacgataatcgctacaatcggggatatatccagcatggcaatgggcggaatgatccttctgaacggctctaaatacggttcgcaaatcgctgcgagaaaccgtccgaccgccgtttctctcgtactcggcacccatgacataaagatatagatgatcagggcaaacgagtagatgtaaattaaataactcagaacggaaaaaatttgataaagaatcatcctgctttaccacctctgatgttcgtcttcatttataagctccgaaatcgtgccggaaacgtcgacattatcaggcgtgcacagaaaaatatctgaaccgattctctgaatgtcgccgccgatggcgtagacggtaccgcttaaaaagtcgacgattcttttcgcctgatcatgctggatgcgctgcagattgacgacaaccgcccgcctgttctttaaatgatcggcgatttcctgcgcttccgcatatacacgcggttcactcaacaccactttagaggatttctgaacactttgcaagcttactacgttctgcttgccctgcggcttctgagcgtaagcaggctgtttatctttctgctgttcatgctcttccggatgatcctgctccgtttcaatgtattcgtactcgtactcctcctcatccattgagaaaaagtttttcagtttatttttcatgctcatttgtttacaccccccggttcatttccgactaatgaagagccgattctgataaaagttgcgccctcttcaacagcgatttcataatcatttgacatgcccattgacagttcccggcacggtgcgtttgtctgatgcagtttttgcacctgatcccccagatcacgcaattgccggaagcaggctctgatcgtttctgtatcgtctgtcaggggagccatcgtcatcaggccctctacagaaatgtttctaaactcagaaagctctctgataaaggggatgacctcctctgtttttaaaccgtgcttagacggctcaagcgaagtattcacctgcacaaaacagcgaaccgcatgctgcgcccgtttttcaatctcttttgccaatgacagtctgtctaaggaatgaatataagatacacggtcaacgacggccttcacctttctggactgaagactgccgataaagtgccactccgggctgcctttgatgacttcctgcttatggataagctcggcatcccggttttctcccagacttgtaataccggcatcaacggcctcttgagccctttcggctgatacgtattttgtaaccgcgatgacggtaacatcttcggggcttcggcccgatctgttacatgcttcgtttattctttcgtttatatgtcgtaattgatcagcaacacgcaagatcttacgcctccttcattccgataaaggacatcatgcgtcccgttttccctttgtcgcggcggtgtgaaaagaatagttcacgctctcgttcggtgcataaaccgctgactgaaatgttttcttccggaatgccgcaatgtatcagaagaagacggttgacctcttttaaatcaagctgatactggcctttttccgtttcgcatatggcggattcagccgtaaaaggcagcgcccgcacttcattgatgacgcggtcgtcgactgtatagcttcccgcgctgatggacggaccgatgacagcctgaatatctgttaaacgggagccttcttcgtttacccagcgttccgtcatgatgcgtccgatttgtttgaccgtccccttccatccggcatgggcagcgccgataatggatttcaccgggtcataaaaatacaagggcacacagtccgcaaaacaaagggccaaaaaaagattcgcatctttcgtgtagagcccgtccgtcccgcggaatgcggaagaatagtctctcgctccttttcctttatccccggctgtcacgcgccggacgcggttttcatgtgtctggtcggcgaacacccaggaatccagatcagtaccgcataaggacgctatgacttcacggtttgtcacaacatcatgagcttcgtcccggacgtgcaatccggtatttaatgactcatacggaggattgctgacaccgccgtttttcgttgtgaatccggcgatgacctttgtgttaagctgattcacacagttccagtcttctatcatgagtgccgagggggtggtaagactaaacgggtgatatgtattcatggagatccaacctttcgacaaacattaaaaaagcgtaatttcccactcattttaacacaattttaagcatacgtttagcggctgattgaaaaatgagataaataaatgtgccggaaacattgagatttccggctttttacaagtaaagggaggattacgctcccccctttggttcgtttacacgcactaagatgacatcttccccaattttaactatatttcgccaaggaatgatcatttcctcttcttttccgaaaaaaccgagaacttttccgctgccgcctaaaataatcgcctgaatttttcccgttgtcacgttaatatcaatatcaccgatgcttccgagtttttttccgttcgacacgtttaccacatcttttatttgaaattcagatatgctgatcatccgtatcacgccctttgcccgttctttttcctattatatgaacggccgggctgaaccttgtcacatcgggcaatcttttttgcggctgcaccaggcgaggataaatctcagcataattttcgtatagtccataagctcatcaacggacacttcctcgtttacggagtgggcgttttttaaatcgccgggaccgtatatgacgctcggaatcccggcatgataaagccaccctccgtcagttacggtttgggaaacatcaatgacgggctcctgttttctgacggctgagtgtgatgcagccaagacagaaactgccggatgatccgggtcgatttccagcgccgggaacacctctcctctgtcttcaatcatcgaagatccgccccatttgaacaccggcctgttttctttgagccacagatcactgtcagcgacacgattaatatagtcttcgatttctgcggctgcttgttcgtgcgtttcgttcggataaaagtggacggtgatccataaccggcattcatcggcgacaaacgctgcgtgtcttccgccttcaatgacggcggggttgatcgtattggtgccgggcgcaaaaccgggatagcttttcgttaccgcccagtggcgctccagctctcccaaggcagtgatgattttcgccattttttcgatggcgctcgctccgaatgtgcctccgcccgcatgaatcatattgcgcctcatgccgtcatgaaatgtttgtttgcttttcaattctatccagccggtgatgactccgccctgcccttgaatatgcaggctgctcgtatccgcgacaacggcaaaatccgcgtgatagccgcgtttgcagcattccagcgtccccgcctcaccgacttcttctccgattacagactgtacaatgaggtcgcccggaagctcaatgccggcatcatggatcagcttcagagagaagagaacacacgccaaaccccctttcatatcagcggcgccccttccgatcagcatgccatcttttacgtgcggctgaaacgggtcagagtgccagtcttcgcccccggcttctgccacatcaatgtgtccgtttaaaatcaggctttgatgcctgcttgaatctgtcccttttaaaacaccgactacattcgggtcttccggatacacatcccacatatcgaccgagcagcccgtttcttttaaaaagccggccacccacttttgggcttctgccgtatttcttgctggcggggccggagtcggaaaggctatcaatctttcagcaatatgtatgaagtcgtgccgccgtttctccgcctggtgtaacagcatatcaatctgatgcattggaaatctcccctttggctgtatcaaaaaaaccgtttcattcatgaaatgaaacgggtaaaaaacgggtcttcctccgcttttttcaccgcttccctccgccggcatgatccggatccggtcctttaagggttgagacaacgtctctctcagccgcatggcagcacccccagggtgaatttatgttattttacggatgatgcctcttttgcacgtgttaaaaacgggcggccattgttccataagacattgacaggcatatcgaaaaacgctgtaagccgctcgtcagaaagcatgtccctgattttcccggaggcgaacacctcgccctgttttaaaagcagcgcctgatcaaataccggcagaatttcttcagcgtgatgggtgacataaaggatggacggcgcattttctttttcggcgatcgacgtaatcgtgtccagcagctgctcccttgccataaaatcaagacccgtcacgggttcgtccagaatcagcagttccggatcagccataagcgcccgcgcaatcagcgctctctgtctttccccttgtgataatgtttcataccgtctgtcggcgtaaccgatggcgcccaaatccttcagaagaccgatcgctttttcccttacctgctcactcggagtttcgtacagcccgattgaggcgtacgcgccgctgagggcgatttcaaaagcggagtccgcggcatataatttgtgctgaagacctgccgaaacaaggccgattttccttctgagcctgtcaccgagctctgttttgccgaattgatggccgagcacctgcatctctcctgaagtggggaagtaataagagcataacatattcagcaaagccgtttttccggctccgtttaatccgtacagcacccaattttcgtttttctcgacgcgccagttgatatctttcaaaatccatttcccgtttctttttaatgacacactgtccagctgtaaaatcattgcagtttcccccgtttactttgtttaaattttctaaaaacttttacacattagaatacatcacttttttgcaaacgtaaaccatcgcatgaaaaaagcctttaaacaaggtttaaaggctttttccgttattgatggatattcttattcatttgtttaatggctgccttttcaagccttgagacctgagcttgggatatgccgatttcttcagcgacttccatttgggttttcccttggaaaaagcgctttcgcaaaatcattttttcccgttcgttcagtcttctcatgccttctttcagagccagctcctcaatccattgtgtatccttattgcgctcatcgctgatctggtccatcacgtaaatcggatcgccgccgtcattataaatcggctcaaacagtgaaaccggatcctggatggcgtcaagggcaaacacaatttcttcatggggcacttcaagaactttggcgatttcctctgctgtcggctccctgcttgtctcactgattaaccgctctcttacttgaagcgctttatatgcgatatcgcgaagcgacctcgagacgcggatcggattgttatcccgcaaatatctgcggatttctccgatgatcatcggtacagcgtatgttgaaaacttaacattatggcttaggtcaaaattatcaatggatttcattagtccgatgcagccgacctgaaataagtcatcaacatactctcctctgttgttaaacctctgaatgacgcttaagacaaggcgcagattgccgtttacaagcttttccctcgctgaatcatcgccctcatcctgtaattgcctaaacagctttctcatctcttcattcttgagcaccggtaatttggaggtatccaccccgcaaatttcgactttatttcttgacacgtttttccctcccactaggagctgctgtacaacgttaagtatctcctcgggtgggaaaaatatgcaccgccattttacagaaataaacatccggcgacggcaatccttgcggcagtaagggctgtcagatggaaaaaattttacaccattttgttaaactcttttctcagtcttttgataatccgcttttcgagccgggagatataagattgtgaaatccccatcatgtcggctacatctttttgagttttttcttcttctccgacaagcccgaaacgcagttccataatctgcttttctctttcgtttaattgctcaagcgcttttttcaaaagttttttatccacattggcttcaatgtcttttgtaataatatcatcatctgtgccgagcacatccgaaagcagcagctcgtttccgtcccaatcaatattcagcggttcatcaaaggacacctctgaacggattttattgtttcggcgcaagtacattaaaatttcgttttcgatacatcgcgacgcgtaggtggcgagtttgattttcttttccggattaaaagtgtttaccgctttgatcaaaccgatggtgccgatgctgattaagtcctcgatgttgatgccggtattttcgaatttgcgggcaatgtaaacgacaagacgtaagtttctctcaatcaggatggcccgcgccgcctgatccccgctcggcagctttaataagagcacctgctcctcttctttagacaaaggcggcggcagcgcctcgcttcctcctatgtaatacacttcatcgcttttcagtccgagtttcatcagccatttataccacaaatatgtcagacgcagcttaagttttttcatcttcctcccccttctaaatacaacgcgttttgagtatgatgaataacagacttttcgtcaggaaacatgttttacagccttccctgtcagcatcttcggatgaacgattccgtcaaattcaccgtccgcggataatggtttcgtgctgatgccgatcaggcatttttcacaagcgatcatttcgtcttttgttaaaatcgtgacgtaatccggctttaaacagagtaaaaattgattgtcctggccgacgcccctgtatggaatcagcctcagcttatccgcatggcggaacgaatcatcaagctgctctatcacttcaagcaggctggcggatttgatgaggtccgtttccttttcgctgagaatcagagcgaatttgtcaatgtgaaggatcatgaccggcgttttcgtcagcggatcatacagctgattcccggaatccaccaatcctttcgcgcggattgtctgtccgctgaattccgcctgcaccatgacaagttcatcgtactgaatggacttcgtctcgatgtcttcaattctctttttcgagaaaaaccatatggccggaaatccgataactacaaacatccagctgatcgggtcgccgaatccggtctggcttgtgaccattaccccttgctgcacaattgattctgtctgcagcagggaatgtacgccgatcattcccccgccgacgagaaaagtcgcgaaataaaaggcgaacaaattttgaaaaaagtatcggaaccgtttaaagccaaaagccgcaagcacgatgactactgaaaacgccatttttcccgccggatgctccacaaagggagaaacaggcgtaaacatcagaagcacaatggctgacccgatgaaaccgccggcggccactcttctttttttcacctggcgttttaaaataaaggcggtcaataaaagcaaaagagaatcaaaacaaaagttcaacagccaaatgacatccagatagattttcacatctgacccctttcctcttttgtcttacttatctgtttctctctcttgtttcataagtataaagcaagctctgtgggaaagtctgtcaattaatgttgagggtaaagtacaatttttaagggataaccgttttatttgtcgagggccgaaagggttgctttcctattgtccgtttcaactaaaaaagcgctgccgtgatctggcagcgctctgtttttactcattgatataaagttttcctttagccgtctgtctcgtttcatttccgtagtcatctcttgcgataacgtcaatttttgctccgcttgctttgatggaagaggtcgccgtccagtaaccctcatatcgtcccggagaaatttctctcagcggaagctctgttgcgttttggctcccagcccgggcgtttgtcagaggcagacggataacgaaggaagcgtctaatttctttccgcttgaaaaagcgattttcactgattctccggcttttaattccttatccgctccgggaaccaatccggaaatgacgggagcattgtaattgacatcgattaccgtctttttcgttgttttgttacccgcttcatctgaggccgtgaccttgatctcattgctgccgttttccagaagggttctcgcttgataagaaccgttatttacttcagctttttttccgttcacctttacccattctaaatgggcgtcgtgcacttttccttttacggtcactgcttctttatttgttttatcaccgtttgccggactgtcaatcgtcacatccggcttatcctcatccagtatgaccgtgacagggcgtgactcatcggttgacccgctgtctgtcacagatgccgccgtcagccgattggcatcttcagtgagtgtgacgccggcctggaaattgccgtctgcatctgctttcgtttctgcggcggttttaccgttattggtaagacggacagcggtttttggtgaagccgttcctttcaccgtgattgacctcttgtttgtaaatgaccggtcttcaggcgacgttatgtcaggcacagaagcttcgtagtcgaccaaagccctgatcataaagtttccgtctgatttatcggttttagaccagcggccgtcgaggtattgccagtttctgttcgagtacggactgccgtcatcagatgacagggcaggtgtataaggatcgggtttcgtctggcggaacacaagataaaaatcctttccgaccgcgattccttttgagctgagatccactttggtccattcgccgtttcgaagcgcttcagcttggaacgggccggcaattttgctgcccggagctccatcagggccggatgcatcatatacttctgcttggaattcggtaccgcccggatcaggccagtcggcgccccaaaatttaaaaaggcctcccgtcagcataccgtgttcttttccgtctttaagcgtcatctttacggcagatttgctgccggctttaaaatatgacagcgcggcttcttccgctccgttatcataggcaatttccccttcataaccgatatacggcttaagcttgacgtttttttcagcatctcctttgatgtcaacggaaaattcgctattgtaaaagccttttgccgctactttgattgtgtaggagccttcgtacgccttaagcgaatattcccctttatcgtttgtcaccgccggttcaattgcggcatcctcagccacataaagcgcagccccttttaccggttcgcctgttgactgattggtgatggttccttttagcgtgccggacggcatttgctccagtgtaaagtctgcctgtgcggttttgtctgattgaatagaaacttgtttcgaagcggacttaaatccgtaagcctcggctttcagcgtatagcttcccgccttatgcgacaggctgtagcttccgctaacagggtcggaatatacggatttccccgtctcggcgacactgatttgcgctctgagagggaggaggtttgtttcacgttttactctttttccgggtgatttcactgccggtttggcctgtttcggactgactgcttttttcttcaggtggccgggaggtgtttgtctattgtgtttactttttttagccgccttgccgagagggctgcttgaaagccggacatcatcgatataccatccgtcttcattgagtacttcgtctgactgcatattaaacatgagctttatgttttggcctttatacgcagataaatctgcctcttcatcgttccatcctgcggagtcaccattgtaaacggccgcctgctcccaatttgattttccttccggaagaacgaacacatacccgtaatcaaaaaattcttcgagcttgtgccagcttttaaattgcaaaaacagccgtcctgtttccggaacttgaatcggaggcatcaccaaattcatgttggctgaatcggcataagggccggacagattcgtcgcatacactttatctccggaaaatgcggcgccgggccctgaactcgggataccccattcccattggtcgtgtgtcccgtaactggaccagcccgccggctgtgattcaaaatcctctttgtatcccgccgtaatgctcggtttcacgtcagcccggtacgtatcagattctacagaatgacctccgaaatcttttatggtccatttataacttaccttgcttcccgttacatccggaatctccgcctggtatgttccctttttttcatcaccgcttttttgaacggcggctgtcgttttccactttccttcatcaaactgataggaaaggctgacttcagttacacttacatcgtcttctgctgtaaccgttaacggaaggtttgcccctttgtaagccgctgagaccggttcatggtgaaagctgggcggattgtgatcttcgcccgcagaagagaccttgccttctacgcctccgattccgtccgttacggcagaaacggcatcaaaagcgttaacgagaccgtggccgtaaccgttattcggtgattccggaaaaacggaatctgtcagcttttcggcggtgcgcgtcaaaacgtcttccatttcatcgaccgtaatagaggcgttcgcctgccttaacaaagccgccgtcgccgccacatgcggcccggccattgaagttccgtcccagccgccttcgtatgttcctccaggaatcgaagaacggatattcactcccggagccgaaatgtccggttttgtttcatgatacggtgaggggccttgaagtgagaaatcagcgagtttcttgtcgatgtcagtcgcacctgtcgcaaatgcttcaggataattggccgggtttgcgattgaacccggtcctcccggtgtaaataagtcttcatttcccgcagagaattccggaaaaatccctgccgctctccacgcattcaccatatcgcggtaccactcgtccattcccgaaccgcctgcccaggaattattgacaacatccggcgccatctcgggatgcggcgtgccgtttttatctttaggcgcgagcacccattcaccggcatccaaaatatcggcatcagttcctccgtcatctgaaaatgcttttactgcgatccattttgcccccggagccacaccgatttgatttgagccgtcaggttctgaacccgtcatggtccctgttacatgagtgccgtgttcaagatcatcgtagggagcgtctttatgggacacggcatcataccagttcatttcatgattcggcgctgcgggattttcaggatcgtaaccccggtatttttctttaagcgccggatgatcccactgaactcccgtatcaatggaagcgacaaccgtgccggttccgtcgtatcctgaagcccaggcctgcggcgcatcaatttggctgatattccattcgatgccttcctttgctttgatctctttttgttttttcttcatttgaaaaggagcttttgattgtcgttgagtaagctgacgtttttcattcggaagaactttttctacttcaggaaatgaggcggctttttccattacctctttcgaagcagtgactgccattccgttaacaatataataggaatggatgtgatcagccttgcctttctttttttgtttttccaaatatgttttcagattctgctgcgcatcatgagccgccagttttaaagaagaaacgacggctgaccgcttttgatattcggtttttgctgcggaaagcgattgagacttggcgtttttttctgcttctttgaccgcttttttcgtattggctttctctttaaatttgataagaaacgtgactttatcatttttttcaaaacgcttcttgactgaatcggaaatcttatgctgaatgctcttagaggaagaaagatctttggtgaaagaaactgcccccggtgtgctgttcgctccggctgcacccggaaacaacagggaactgacgacaatcgcgcttaaaacggagcctgtccatctgtttcttgtttttttcttcaatcgtatccccccttatttggtaacgccctataaaatgtgtatccctccttcataattggaatcgtttgtcatttcgatgctgtacgttaaatgtagacaatcttccatccagatattgtcgcattctgtagaaagccgtatgaaactaaaaaacaatcaattcgtcataggtataaagtttcttttttcactgtatagatcatggggataggaaggaagactgtacacaaaaaagaaaaaggacaaaaccatgtggtcttgtccttttttacatcagccgcgtttgttgcggtttcttaaaaatgtaggaatgtcgagggcatcatccgccggctgtgatgtatggcggttcaccgtgttttgatgctgtgtttcttctcgtttcggctcacgtttcgcagcgttttggctttgagacttcaatccttggtttaaagtcggacgctgcggttttgagtcatctttttcctgttcgataaaaccggtcgcaataacggtgacgacgatttcatctttcagattttcattgataactgaaccgaaaatcatgttgacatcagggtcggatgcagaagcgacgatgtcggctgcttcctgcacttcgtagaggctcaggtttgtacctcccgtaatgttcatcaaaacaccttgcgctccgtcgattgccgcttccagtaacggactggagatcgcctttttggcggcttcagcagcacggctttcgcccgtagcgatcccgatacccatcaatgctgaacctttgttggacatgatggttttgacatcggcaaagtccaagttgattaaaccaggcgtcgcgatgaggtcagagataccttgcaccccttggcgaagcacgttatcagcttcacggaatgcttcaagcatcggtgtgtttttatcgacgatttcaagaatgcggtcattcggaataacgatcagtgtgtcaacggcttctttcattgccgtgataccgcctgcagcctgcagctgacgttttcttccttcaaatgtaaacggtcttgttacgacaccgacagtcaaagcgcctaagtcctttgcgatttgcgcgataaccggtgcggctcccgttccggtaccgcctcccattccggctgtaacgaacaccatgtcagcaccttttagcgcttcttcgatttgttccttactttcttcagcggcttttttgccgacttccggattcgctcccgctccgagaccgcgggtcagcttttccccgatctgcattttcacttccgcttttgacaggttaagagcttgcgcgtccgtgtttaccgcaatgtactctacaccctgcacttcattttcaatcattcggttgaccgcgttattaccgccgcctcctactccgattactttaattgatgctaagccgtctatgtttgtttcgaaatccaacatgctaaatcctcctaatctgccgaatgactatcaatctattcccaaaacatgcttaatagttttttcattttgctcggtttgttgtgttcggcttgtgttttttgttttgcttttggacgctgctgcgcctctggccgctgatgatgttcttcttcgtgagagaccgcgatttcctgcacggcttcttccggcatatgaaagcctatttttcttccctgaattctggcatttcggcaggcaaattgtatcaagccgacacccgtcatatactgagggtcccttacaccgatataattcgggcttgcgacccttacattgtgcctcagcacttcctgtgccaatgaaagcactccgggcattgcggcctgtccgccggtcagcacaaagccgccgggcagatctgtaattcccatatgctcaatttcggctgcggcaatctcaagaatctcttccactcttgcttcaataatattggcaatttcctgctgtgtaaaagattgcttttgattcgttcctatgacggtgacttcaaatacttcatcttctgaagcctcatcgtagaatgcatgtccgaattgtttttttactctttcagcctcttcggtggaagtgcgcaatccgatcgatacatctttcgtgatgttttcgcctccgagcggaatgacggctgtctccttcaggtgcccctgttcaaataccgccaccgtcgtcgagccgccgccgatatcaatcatggcgactccgaggtttttttcgtcttttgacaaagccgccgaaccggccgcaagcggctgcaggcaaatatcagtaatttcaacgcccgctctctccacacagcgaagtaaattatgtaagatcgttttggagccggtaatcagcgtgccttctacttccaggcgcacgccgagcatttttttcggatcggtaatttcgtctcttccgtcaacaataaactgtttcggaacgacgtctacgatcagctgctcatgcggaactgacacgacctgtgccgcttccattaccctgcggacgtcttcaacgtgaatttctttgttttcactggaaacagcgacaacgccgttcgtatcttgaatatgaatataatttccattaacgccgacaatggcttttttcagcggaaaacctaccattctttcagcttggtcaaacgcttttcttatagaatgaacggtttcatctatatcaacgattgagccttttttcaacccttcagacggtacatttcccactccgataatgttaagggaatcatctgtcatttctccgacgatcacttttgtattggacgtaccgatgtcaagactgacgtaaagttcattgttgttcattctatggcacctcctcacatttcgatcaaattctattctattatttgcggaacaacaatacaatgaatgtggctttacaagtgtgtaacaaaaacaacagcatcaacaaattcttatctgatttctcacaatttatgtttaatgaaactattcgttatattctatgtatatcctcttttatatcgtattttttttattttttttagagacggcccaccttaccgtaagatttcctttcacggtgccatactgtgcaaaccagatgcaaatatacccgctttccattagtctacactaagatgaacctccagaaaagctatagatattgccagaaacatccgaaaaaagaagaaacaggaggaaaattccaaatgcaatgctcattgcagaagacacgcccattgcattgagaattttccgcttgtccggcagccatatcccgggcaaaaacaaacatagtcataatgattccgctatcggttatatcggctgccccgctgattgtaatagattcttttgaatcaccttgaaattagttctttagaactattaatcattttcttttttcttgccggatttacctttgttaaattcttcaaaatacgtagcgacttctaagtggataatcccctttttcccgccgtccagctgggaaacgatagatggataggtcttcatccggccggcaaacgttttaatagaagcggtaactacatacccgtcgttcatatacagcttgatccggtcctgatccatttttaccggtgtataatagatttcagaaatcgactgcttaagcgaaccggaaagcttatcaagctgctccgccattttgacccgctttttcgcgtttgtccagtcaaccaaaatcgggcccgcgtcatccggcgtgacttcgttcggcagcacagtgccgttttcgagcacttcataatatacatcatgtcgctgcagatacgcgatcgtcttgtattcttcaatgtgaatgctgactttgttaggaaatacttttgaaagttccgcctttttcaccagcttattctgctcaatcttttcttctgtttgtttcttgttcagactccagaactcggtttgtccgttatgtatatcagaaagcgcgttgatctcttttacagacacgttttcgtttccggaaacggtgacagaagacactttgctgatcggcatctgcaagtacacgatgatcagcaccatcataaaaaagagcacaatgaatgaaatcagccggcggtttgctttttgcttccgctgctctttgattttcggaatccgctcttcaatatttacaattttttctctttcatgatttgggttcactgcctgtccacctcactaagaatgaaacagcttgacattcgtctgattgaaaaacaaacggcatgctgtgatgccgtttgacatttgttaaaagtatatcacatgagctcacgtaatcagagaaccttttaacgattccctccgatgatttcaacttctgtatgcatgtcaacatcatactgctcacggattgtctttttcacatattcaatcaggtcgagaacgtccttggcagtcgctccgccggcattgacgataaaattcccgtgcatttcggacacttttgctccgccgatctgatgtccttttaatcccgctttttcaacgaggtttccggcatgatccggcagcggatttctgaatatgctcccggcgcatgggcttgaatacggctgagtgttttttctgtaatctttgttctgctgcatttgcgccgtaatggcttcccgttccttttgctcaagctgaagaactgcctcgagacagacgccggggcgttttttctgcaaaacagacgttctgtagctgaaatccatctcttcgtttgtcagccattcgattgtgccgtcttcaaataagatacgggctttcacaagaatctcactcatatcagatccgtgcgccccggcattcatatagacggctccgccgattgatccaggaatgcccgctgcaaattcgagaccggacattccttttttactcatggaagtcgcaagccggacgaccgaatagccgcctccgaccgtcacctgatcaccgtcaatctccaaatgatccagacccgctcccagcttgatgacaactcctcttatgccttcatcaagcacgagcagatttgaaccgcgtccgataaccgtccatggcagatcatgtttcttcacaatatccataatatctttgaccgcttccacacggttggggatgattaaaatgtccgccggaccgccgattttcatcgttgtatggttcgcgagcggttcttgttccagcactttgccgacttcgcggtctcttaattcctgaattacgttctccatcataaacctccgcattccatttgctctatttttttatgtcttccatgatactgtacagtctggctgccgcatccggaacaccgagtgattttgtccgctcactcatgtcttttaaggtttcttcattcatgacgattttgtccagcgcagcgatcagtttttctccgctgagctcggtttccttcagtacgattgcagcgtcatgctggctgagcgccttcgcattgacttcctggtgattggctgtcacatacgggctcggaataagcacgctcggaatgccgagagcggtgatttccgcaatcgtcgtcgctccggctctggccacaatgacatcaattgattgtaagtactccggcatttggtgcaaaaacggttttgtcaccatattatcagcggcttttccgcctttcagctcagccgttaccttctcgtaatgcacttccccggtaatataaagcacttggtaaggtctcgttttcaattcttcctgcatatctataacggcacggttaatgggagccgcgcctctgcttccgccgaaaatgagcaccgttttttgattgtctttcagcccgaactcagttaatgagcggcctgtcttaattgagacgacttcagaggctctcgggtttcccgtaaacacaactttttcagcaggaaaatgcgattttgcctcttcaaagcaaattgctaccttattaacatatttcgagagaaacttatttgtgatgccgggcaggctgttttgctcatgaatgatcgtcggaattcccatttttgccgccgcgtatacaaccggaccgcatacatagccgcctgtaccgataacggcatccggtttaaactcttttaaatatgatttgcttttcttcacgccttttaagaaacgcatgacggtttttacattttcaaaagaaagttttcgtttgaaacctgtaatttcaatggcgcggaacgggatattttcccgttcaacaatttttttctcaagaccgttctctgttccgatatacaaaaattccacatccggatgccggcgctgaacttctttaataaaggccagggccggataaatatgtcctccggttccgcctccgcttactgcaatacgcattcgtatgtcccccttaatcacatagcgataaccctgttttttaggacagggttattgatgttgtctgtttttttatagataacgaataaatcatgagtgatgaggcaagatacagatcaatacctcgagtaccggctgacatttaaaagcacgccgaccgctgcgagcatcagcgtcagtgatgagcctccgtagcttaaaaacggcagcgtaattcctgttaccgggatcagccccgtcacaacgccgatattaatcatgacttgaatagctatcatagaaataataccgatagcgacaaagcttccgtataaatccggcgcgccgagggcaattctgacgccccgccataataaaatagtgaacagcagcaatatgagcgaaccgccgataaagccgagttcctcagataaaatagcaaaaatgaaatcggtttgcggctccggcaggtaaaaaaacttttgccggctttggccgagccccatcccgaacagtccgcccggacctacggcatagagcgactgaatgatctgaaatccgcttccaagcggatcctcccacgggtttaagtaagaggtaatccgtttaatccgataaggagcggacagaactagtgccgcaaatccgcttaaaccgatgagtccgaggaacgcaaaatgagcgattcgcgcaccggaaacaaaaatcatcacgatgcacgtgcccaccattaccgtccccgttcccaggtctggctggcacataataataataaatgcagaaaacacgattccgagcgcgggaacgaatccgcgtctgaatgacgtaatattcttctgtttttcagaaagaaatttagccagaaacgcaatcatcgcgagtttcataaactccgaaggctgaatgctgaacgctcccactccgatccagcttcttgaaccgttccgcaccattccgactcccggaatcagcacaagcacaagcagaaaaaaacatatgatcagaagcagcttcgaccatgtgcgccatgtccaataatccacattcataatgaaaaacatggcaatgacgccgatccccgcaaacagcagctgccgtttcgcgaagaaaaacgagtcgtcaaatttataatccgcccataccgcacttgcactgtagaccataattaatcctattgttaaaagcaataacgtaatgataactaataacaaatcaggcgctgtttttttagtagtcaaagcaatcgacaccccaagcataagtcatttagggctgccgatgaacagagacaagcccttacttaagcatatgcacggcatctataaacatgtcaccgcgttcttcaaatgttttgaactgatcccagcttgcacacgcgggtgacaagaggatgacgtctccttcatttgagagcgcaaacgccgcagatactgcttgttcaacattatcgacacgtttgacatgttgtattcccagctcattgcccagtttttctatcttcggcgctgtctgtccgaacgtcaggaccgctttgacattgtccatatacggtttcaggtcgtcaaaaccgttgccgcggtccagtccgcctgcaagcagaataaccggtgctttgaacgccgagagcgctttgcttgtggccaaaatattcgtcgctttgctgtcattataaaatttgcgattctggatcgcagttacatactgcagacggtgtttgacaccggtaaagcttgtcagcaccttctgaatcgctttattagacgcgcccgccgtttttgccgcggctacagcggctaaaatattttctaaattgtgcgcgcccggcagtacgatgtcatcaacaggcagaatcgcttcatcgccgaacatcagcattccgtctttaatgaatgcgccgcttgacagttcctggtggactgaaaacggaacggtgccggcttttccgctttcggcaagccgcacgactgtttcatcgctttgattgacgatggccgtatcactctcaagctgatgaagatacacgttctgcttggctttttcatagttttcacggctgtgatggtaatccaaatgagcgtcgaacacatttaaaatcaggccgatttcaggtctgaacgcatgagtccccataagctggaacgaagaaagctctgtgacgatccattcatcaccgtcagcatgataagccacttcactggcgacagtgccgatattccctgcgatcagcgcctttatcgaatcagctttcagcatttcataaatcagggtcgtcgttgttgttttcccgtttgaacctgtaatgccgatgaattttgcattggtgatataatacgcaagctcgatttccgtccagaccgggatgcctcttctttgcgcttcctccaccatgatattttcatacgggattccgggatttttgatcagaatggtaatgtgatgctgatcaaaaagtgacgtcggatgctcaccgcagatgacttcaattcctctttctgcaagcctttgggcaggttcgttctcttcaaaggctttttgatcattcacgacgacgttaatgcctttttcatgaagaatcgacgcagccgcatatccgcttttcgccagtccgaggaccagaaagttttgtttttgcaaaaaaagttcgttttccacttataaccacacctcgatgtaaattcctaaaacggcaagcagcagtcccgcagcccagaatgtgacgacaactctccattcagaccatccgaccaattcgtaatggtggtgaagcggactcatcttaaagattcgttttcctgtcgttttaaagctgatgacttgtaagataacagataaggtctcaataacaaatactccgccgataatgacgagcagaatttcaagcttcgtcagaatggcaacggtcacgatcgctcctccgagcgcaagcgaaccggtatcccccataaataccttggcgggatgggcgttgaatacaagaaaaccgagaacggcgccgacaacggcaaccgagaaaatcgcaacgtcatattgtgactggttccacgcaaggatggcgaaagcgccgaatgcgatagccgcggtaccggacaagagaccgtccagaccgtctgtcaggttgacggcatttgaacctccgacaagcataaagagaacgaggataaagtatccccagccgagatcgattgacagatgtgtgcccggcaccctgatgccggttgaaaaatggcaataatgatatactccgtaaaatacaatggcaataatgatctggccgatcaatttctgcttcgacgtcaatccgagattccgtttcattactactttaatatagtcatccagaaagccgagcaggccgtatccgatcgtgacaaacagcagaagaaacatttccgcgctcagatgcgaaaatttctgcgtcatgacaatcgccgtaatggcgatggatacaataatcatgaccccgcccatcgtcggcgtccctgattttttcatatgtgatttcggcccctcttccctgatactttggccgaattttaaacgtcttaaaaacgggataagaatcggagatatcagaacactgattaaaaatcccattattattgtaaataaaatcacttgctcaagcattgctcttttctcctcccgtttcgttcaaacgacatacgtatttatcatattcacattgtgtccccgtaattcttttcatttccctcattctaacactctttcctgttttactttttattcagctcaacaatagctcttcccgctacttcggcgtcatcaaagtcgaatgtttcattgccgatctgctgataggtttcatgccctttcccggcaatcagaaccacatctccctttttcgcgttggcaatggcaaaaaagatagcctgctcgcggtttgcgatactgtgatagtaagtgccttctacccctctttccatatctcttaatatggccagcgggtcctcgcttctcgggttatctgaagtgaaaatcggttcgtcggcaatccgcaccgcaatttccgccattttcgggcgtttcgttttgtcccggtcaccgccgcagccgacgacgacgaaaagcttgccctctgtcatgtctttgcatgtattcaggacgttttccagactgtcaggcgtgtgcgcgtaatcgacgactacaggaaacggctgattatgatttaccagttcaaaccggcctctgacaccttgcagctcttcaagagcgcttgtgatcgtatcaaacggcagacccgctgcgatcgctgtcgccgctgcagccagtacgttatacacgttgaagcggccgacgagtgaaactgtgatctgctttgttccttttggcgtaacaagttcaaagcttgtgccttgcgcagagatctcgatttgtttcgccatgacatcggcatcattctcgattccgtatgtaaggatgtgcgccgccgtcactttttcaaaataagcactggctttgtcatctgcgtttaaaacggcccgcttcggcttttcgtggttaaaggagccgcccagctgggaaaacaggaggcttttagcctgtctgtagtcttccatcgtcttgtgataatctaaatggtcctgcgtcaggttcgtgaatacggcgatatcataatcgcagccgtgaaccctgccgagtgacagagcgtgagaagacacttccataatagctgtgtcaacatgctcatcattcattttcttgaacgttttttgcagtgtgacgctttcgggcgttgtatttttgaccgggaatgtctcatccccgattttaatgtacatcgttccgattaaaccggtctgtcttcccgcttttttgaaaatctcatcaaccatgtgcgtcgttgatgttttgccgtttgtgccggtgatgccgataagctgaagctgctttgtcggctgcccgtaaaacgcgtcagaaagaacgctgagcgcccgctgtgaccggcggacaataatgacaggaacatcgacgtcaagctctttctcggcaacgatggccgctgcgccgttttctgcagctttttgggcaaaatcatgtccgtctaccgtatacccttttatacacacaaaaagactcccttttctcacttccctggagtccatctcaattgaagttatgtcagggtcatgaaagtcattttgaacaggttcggccattaaatatgtaagcagctttgtaagtttcattgtatcaaacctctcagaaattctattcattcttttatcatgataaccgtttataaaagtcagaatggcttttaaacatacagttcatattttagcgtaaataaaaggatacatccagttaatcttaaaagttatcttctttttttctctttatgataagaggcagccgaaaacaatcggctgcctcaaaaagactcattcttcactcaagtaaacacggatctttgagccttcttttactttcgttccggctgcaggtgattgtttcacaattttgcttccttttcctgaggagtcaatattcaaattgacaagcagcgactcaagatcagagacagacatccctacaacattcggaacctctattgtttttgtgtcgttccattgatattttttctcgatttgattttttcgcggtttcacgccgagctcaggcagactgtctctcatcatatttccgacaatcggcgcggcgacggttcccccgaattgaatcgtgcctttcggattatcaaccgcgacatacacgacaaggctcgggtcatcagccggcgcaaaaccgataaaggagacgatatggttgttttcgagatatttgccgtctttgaccttttgtgcggtacctgtttttccgccgacgcgatatccttccacaaaggcattccgccccgttccctgagcgacgacgctttctaaagcatatctgatctgctttgacgtttcctgggaaataacttgccttttcgcaatcggcgattgtttcttaacggtttttttcgtaacgggatcaacccactctttggcgataaatggagtataaagcgttccgccgtttattgctgcggaaacggctgccacctgctgaatcggcgtgacggaaaccccttgtccgaaagcggttgtcgcctgttcgaccgggccgactctgtcaagcgggaataagatccccgttccttccccttgcagatcaatgcctgttttctttccaaagccgaagtccttaatatattgaaacagcttttgttttccgagccgttcccccagctgtacaaacccggggttgcaggaattttgaacgacttcaagataagattgcgaaccgtggccgccctttttccagcatcggaggcgggcgccgtcgacctcggcaaatcctttgtcataaaagtggtctctttgcaagtttactttttgctcttgaagagccgccgcaagcgtaataatcttaaaggtcgaacccggttcatatgtgctccataccggcaggttccggttgtaaacagacggatccaccgattgatagtcagccggatcaaaatcaggacggcttgacatgccgagcacttccccgtttttcggattcattgcgaccgcaatcattccgtccgggttatatttcgccgctgcattgtcgagctctctttctataatcgtctgaaccttggcgtcaatcgtcagtttcatatcaagtccgtctttcggaggggtgtaatcatccgcttcatcaggcattttcttccccttggcatccgtataaaatttcacggatccctttacaccttttaagtcatcatcataataagcctccaatccgagaaggccctggttatcaataccggcaaaaccgagaacatgggacaaaaagcttccgtacggataatggcggatgctgtcttcagccacataaaccccttttaagtcgagcgctttgatttctttcgcttttttattggaaattttccgcccctcgggtgagattttttctatggaggttttcttagtaatgtgtttgtagaccttctcttccgacatatttaaaactgacgcgagaagcttgcccgtttttatgggattttggatctggcgcggtacgacaaagacggtcggcgcgcttttattagtagccagcttcacgccgtttcggtcaagaatctctccccgctcaggctcaaacggcaaatttcggctccaggaatccttagccagtgaagtcagcttttctcccatcacgaattggacatagcctaatctgctgtcaatgatcaaaaaaatgattacgccaaaaagcaaaaccagtaataaacgttttcgaaccgttacatttgaaacgcgcaagggaccgtccactccttatttaggcttgtttcaatttatgcctcagcttggacacatagaacggcggcgcataaaaaagaagcccgcgggcatccgcggacttctctgtcccgttaatcaggatttttaaatttcaccttgatcacggtattttctttcagttctttgccttttttcacactttggcttgaagcgtaaccttcaccgctcacatcgatgtgaatgcctgatactttgctgaattgaagcacttcccgtctcgaccatccggacatatccggcatcgtcatctttccgtctgtttttaagaagattttctgattggtgatcagatcttctccggctgtcggatactgctcttttacggcaacatcgctgccgatgacaatcggtgtgagatgttcatttttcgcttccttctcagcgctcttgaccgtcttatctgtcaggtcaggcatcttttggcttttcgtttcttcctgaccggaatctgttttttccgtcggttcgatattcatgtagtgaaggctgtttttcatcgtcgggttaaagatttccgcgacaggatcagagctgctttgccccgcttttaattgcggctgctgcacggctacatagatgacgagcttaggatcatttttcggcgccatgcccatgaatgaaaacacatagttgctcgttcctcttaaatatccgcccgtcccggcaatttgtgcggttcccgttttacccgcgacgtcaaatccttcaattttataaggttttcccgttccgatgtctgacgtcacgacttctccgagcagattccggacttttttcgccgtatcggctgaaatcggcgtgcctgcttgctctggttttgtctgcttgacgacttttttcgtatcggggtcgacaatatgatcaatgacgtaaggtttcatcattttgccgttattggcaatcgccgtgacggcctgaagctgctggatcggcgttatcgccgatgcttggccgtaagccgtagacgctttgtcaaaatcatatttgtagttaattttacttgatacttcaccgggcagatcaacccctgttttttgatagagcccgaatttgtgcaggtactcattaaaccggtcaaaccccagtttttcgttggccagtttggcaaaagcaacattggatgacctcataaggccgtcatggaagcttgtcatgccccagccggcgccatcgttccaatctttaacaggtccgcctcccactttatatgttcctgatttatatttctcgtttgcggaaaacacattttcctgaatcgccgcagcaagcgtaaagatcttcatcgttgaacccggttcatacgcgtacgacactaagtcgttgtaataattggtgacgtttctgatattcgggtcaaaactcggacgctgccccatcgcaagcactttgcctgttttcggttctacgacagccgccataatttttttcggtttatatttttccgctactttcgtcatgctgtcttctaaaaaggtttgaattttctgatcaatggttaaatatacattgtcaccgtttttaggtgcggtgattttttctttgctgttcggaagtttccagccggatttatcactttcgtaagtgacggatccgtcgcgttccgtcagatagttgttcagtattttttcaagccctaaagagccttgtatctcgtttgttttttcattcacatcggcatagccgagaacatttgacaaaaatacaccgttcggatagtaacgcttcgtatctcttaagaaagaaatacccggaagattcattttttcgatcttttgttttttcgcataagagatatcgcggccggctgaaccgaattccacctgcttcgcgccatccctgtttaagatgtccagaatctcgcttttatcaagattgataacggtcgccagtttttccgccgttttctctttgtctttgacatgctgaggatgcttcttgtcggtcgtcatctttttatcaagcacggcaatgagcttatatgtcgccgtgtcctctgcaagcactttaccgttccggtcaagaatagagccgcggctcgcttctatcgtccgctttttttcgtgctgctcggtcgcttttgttgcaagttctacaccgtttgctttaccggttaattgaatgtacgccattctcccgagaatgacaaagaaaaagagagcgaaacaaatactgagtatcgctgctcctctgttcataaacttattttttttcggcatgggttatcattcctgtatgtttttcacttttttatctttcagattcaaaccgtgctttttggcgatatccatcaggcgctgcggctggcttaagtcagcagccgtcttttcgagatcaccgatctgcttattcttctcagatactttctcctccagtttttgcacctcaatattggattggtacgccgcgtatgcctttgatacgataaacattgatgtggagagaacggcaatggcaaacaggacgagcagcaccttttccccgagtgtaatggaagccctctttttgacaatcacctttttttcgggacttatcactggccgttgttgtttttcctgctggtaagctaagttgctcataggctgatgacctcctttaatgttgtcatttgctgcccgttattttcgtttctccgcaatgcggagcttcgctgaccgggcgcggttattttcttcaagctcctcttttgatgccgtaatgggctttcttgtaatcagctttaattccggttcaaattcttccggtatcacaggaagacccggaggcagttcgggaagtgatgatttttccttgaatgtcgtcttgcacattctgtcttccagcgagtgaaaagtgatcacagacacccttccgcccggcttcagcacctctatcgcttgcaagagggcctcttcaaatacttgaagctcgtcgtttacggcgattcgtatggcttggaatacacgtttggccggatgacctccgcttcttcttgccggagccggtattgcgtcctttattagatcgaccagttggccggttgtttgaataggcgatttttctcttgcctcttcaatttttcgggcgatctgcttgctgaatttttcttctccgtatttaaagaaaatcctcacaaggtcctcataccgccattcatttacgacttctttcgccgtaagggcggccgactggtccatcctcatgtccagcggtgcgtcatgatgatagctgaatccccgttccggtgtatcaagctgcggagaggatactcctaaatcaaataaaattccgtcaacactcgtaatgccgtgttcatgtaaacactcttttaaataacgaaagttgcttttcaccagaatgagctgtcctttgtattcggacaatgttttctttgcgttttcaagcgccgtgtcatcttggtcaaaggcgatcaagcgtcctttttccgataattgctgcaataaatatgtactgtgcccggcgccgccaagggtgcagtccacataggttccgcccggtttgatatttaaaccgtcgacggtttcacgaagaagtactgtcttatgctgaaacatttgtgtcggtcccacctttatcaggaatgaattgaattgtcagttgttgttgtgatgcacgaagatccattatatatcaaatccaatcatgttttcagcaatttcagcgaatgaatcttcttgctcttctgtgtattgttcccatattaccttactccacaattcaattcgattggaaaccccgatgacaacacattctttttccagttttgcgtaattcagaagagatgacgcaatattaacccttccctgcttgtccagttcgcattcggtcgcaccggaaaaaaagaatcgggtaaatgcgcgggcgtcttttttggtgagcggcagagccttcagcttttcttcaatcagcttccattcattcatcggatagccgaaaaggcattggtccagtcctctggtcagcacaaactgctcaccgaggccttctctgaattttgcgggtacgatcatgcggccctttgcatcaacagtatgccggtattcacccataaacatgataaggacccccactttctcccctaaactcaccactatccgccacttctctccacaacctcattttacactgtttacacataaaaaaaaaccctgaactattcagggttctttaaaactttatttcaaagtttgacaatctgatgttggttttgaaaagaaaatggcagatgtttgaaggttgtgaagaattttggaccgtagcggttcagataatacatcacattccaaatccgttcctgcggagcgccgagcggtctgatgctgttttggattctttcatagtcacgcagcacaaagccttctttttcttcaattcttttcattaccgtccgttctaaaaacaagagctgatcttgaatgaaggcggcattcttctgtaagagcggctcaaggcttgaatcgaccttcagcgcttcgtcccttgcgcgtttatggacagcttcaatctgcgacttcgcctgttccattacagaagaaaactcttccggaatctgctcttcaaaataagtgtctttcaggtgtccggtgccgtgttcgatcgcttcctgaagcgggatattccgttctgaaagcttcttttcaatatggcgctctaaaatcgtaatgttcagtctcggcactaccggcgtcatgcgaaagcccattaatgagaaagcccgcttcagctcaccccaataattgatctcccccggtcccgcgataaacgccagagtcgggatgagaaactcctgcatgagcggccttgtcacaacgttattgctgaaacattccggtttttcttccatatgggtatgaagctcgtcgttcgtccacttcaggtcaagctccttaatgacaaaaacgccgttttctttttcaattaagaaacgctctccctcatgttcgtaaaacagattggcctgatctttgtccgattcaataatcgggtgataaccggcttcccgcataaaacgctgctggtctgacacggctttggcaagctcatgattgtgttttaaaatctgctgaaacatacctgtttccagctttttaatccccggatctcccgaattcatcagaataaggccttcttcttgaaacaagtcggcgatcaacagctcaaaaaagtccgtgaatgtctctgatgagcgtaaacatcgcttcacgttttgaaggagtgcgtttgtgtgatccgtctcctcaaaagcagcgaacacttcatcaatccaagccgcgcatttttcctgatcaagctcggttttagccgccgatgtttttttccagtacgactgcggcagtttctgtttcaccggacctttattctctgttgacgtgtgcacaaaattgatttcttccagatcgtgatcttcacccgccacccagaaaatcggaacgacaggaatctgcaacgcctcttcctgctgtctggcaagtacgataatggagataattttatgtatggtgtaaagaggccccgttaaaagaccggcctgctggccgcctactaccgctgcgctttttggatctctcagtttttcgatggaggcctgcatggcggcggagtaaaatttttcgtgataggaggataaataatccgctaattcctctctggcaaacggccgcgaagacaggtcatgaagccgcttttgccatacgtcctctgaatgaatatcataatcaaaaaatgaagacatgttttctccatctatatagtgctgcacaaacttattttgacttttgatggaaagttcagttagctgcatctgtctggaacttcctttctccaataaatagttaggtttccgaaatgagtatagcatgttaccggaaaacctcaaaagactttgtttcagtttctttctaacgcttttatgctgcggtgtaaaaacgtgagatgaacggccggcaatccgcggctttccgcttcttttacaaggtagccgataatcgcatcggcctctgtccgcctgcctgccatgatatcgacgagcatggaagaatgatttttttccgtcagtctgcaaacttcgcaaaccttgttccacgctttttctctatcggcgaggccaagtattgtctccgcttcttcaaacacgtttctcatatactttttgtaagcgtcatttcttaacagctctccgtttttcacgcgcagcaatgcagttaacgggttgatgcatacatttatgatcagttttcccgttaaaagccgataccagtcgttttcatcatatacgggaaaatcccggtgcatgccggaaaagatgcttttgagcgtttccggccgggatgcgctgaatacactccatcttacggctcccgctcccgtatgttcaacggcatgatctgatatcttttttgctccgtgctcaacagtgccgacataaagcgaatgatccgtatgccaatctttaatgtcgtgtatgtgtcccatgccgttttgcaaaaacagcacattcgtcccttttatcgtctcaagatcccgcaacacagcacttagctggtgctgtttaacggctgcgattaagaggtcgaatccggaaatgatgcctgtttgcgctctgcatgccgccgtacattctattccgcctttcaaaagccgtataccgcctgagttaatcgcatcagcctgctccgtccgccgcgtaatgaccgttacctgatggcgggacgataagtagtaagcacataaaaggcctaccgctccgccgccgataattccgattttcacactgtcacaccctatatctgcatttttccatattatcatagcagaagccgccgcaaattacttcaatttcgttttgagcaaaaagactggcaagcatattatagttggaattttcaattaaagcgtttacaataatggtagaacacaacaaagggggagtttgtgttgaaaatagagcgactgctcatcaactttaagacactcgaagaatttaaaaggtttaaggaatacgggatgcaggagctgtcgatgcttgaagatcttcaggataatatcattgaaaatgacagcacctcgcctttttacgggatttacttcggggataaactagtggcgagaatgagtttatatcaggtaaacggaggcacgaatccgtattttgatcagcgtcaggactttttggaactttggaagcttgaggttcttccgggctatcaaaacaacggatacggaaaagcgcttgttgattttgcaaaatccttcagaatgccgatcaggacgaattcacgcatgaaatcagcagatttctgggataagatgaattttgagcccgttaaatatgatatggcgcgtgataaaggagaaaatccttatatctggcatcccgatatggacggtgaaatgacatccggagaaacggcataataaaaaaccggccgggccgccgcccccaggccggttcattttacaggctctgcgccgattttctgtcgtcttcttttgaattgaccatccttctcgctctgtccataatgtcaattaacgctttataatcttcttccgtcatctccagcttgtttctcaagctttcattttcctcacgcagatcctcgacttctttttgcagcgcggtcagctgttctgtgagtttttctttttcatgacgcacatccgctgcggctggcgactctttaaattgctgcagaaacaaaatgacatcatcaatggacagctctttttctccttccgccctgcggatcggaggctgtttgacggttcccggcagattggcggaatgcaccccgatctgctttcttaattccttccgctgttttttcgccagctctatccctgactgatattgttttctgacataagaattccatctgaacccgcaggcggcagccgttctcgtcagcgctctgccgacttcttcaaaagcggaaagctgggtcccgccttcccgaatatgcctgagcaccacttcggccagcagcaaatcttcatcttgcgtccacgcgtcttgtctcgttatcgtcaatcgtatctccctccatatttgctcatttacctcatacatatgccgctgatagattagatagactactggggctcacaattttttcggcggaagcaggccggaggggcaaaaaaaagaaaagcgcaggaaccgagattcccgcgcttttcttcatacattaattgcttttaacatttatgtctttgccgttgtatgatccgcatgctttacatacacggtgagacaatttcatctctccgcatgacgggcattctgtcataccaggtacatttagtttgaaatgtgtacggcgcaatctttttttcattttagaagttcttctaaaaggtacagccattattcccacctccttaaagagttaagattcatcatcttgtgttaagagctttttcagatccgcaagtctggggtcgatttgatttttcttgtcttcctcagaaatcacttgccaatccttccccacttggggagcggctccttctttttgttcagtttcacaaaagacttgcataggaatttctaaaagaatctcttcttttatgatcggagttaagtcgacggtatcgtcttcagcaaaatgaacgtcctcatcttctatatcatccgacttatgaaatctaaacagttcttttgtcgcgattgtaaatggatacggcacatcaactaaagttcttgagcacggcaaaaccatttcgcctgaaatcgtaaagtcaaacgaaacttgcttggattcaatctccgcgcggcccttcacccggacgggagaaatgcggcggatgtcagaattcaattttgtcagctcatttaactcaactgtttcatcaaattcaaagctctttttcgccatttgatgaagctgataaatcgtccatttcatttgtatcacctcaggaaagcaacaaacatgattatagcttttcagaatgtttttgtcaatattttttctttacagcataatgccgccgtcatgcaatcgttgacagccggataggctatgcatacactaaacgaaacggactaaaatatgcacttcatttgcaaatgtaccacacgaagcaaaacatagcaagaaaggcgggacaaatatgaaagcagtcggcctggttgttgaatataatccctttcataacggacaccgctatcatgcggaacaagcaaaaatcaaaacggacagcagcgtcgcggcggcggtgatgagcggcccttttttgcagcgcggggaaccggccgccgtctcaaagtggggccggacaaaaatggcgctggaaaacggcgtggatatcgtcattgagctcccttatatatatgccgtacaaaaagcggaattattcgcgcgcggcagcgtttcgcttcttcatcatttaggatgcagcagcttgtttttcggcagcgaaaacgggcggatcgaaccctttattgaagcgtctgaagcgttcagccgaaaggaagatgactgcagcctgattctgaaagaggagctgaaaaagggtctcagctatccggccgccgcctcaaaagctttttcacacatattcaaagggcgggacatgctcgatttgtccaagccgaacaatattctcggttttcactacgttagagcgatacacacctccggttccgctatgaagccttatacgacagccagaatcgcttcccaatatcatgacgccgagcttcccggagataacagccggatagccagcgcaacaagcatccggaaagcgctgatagaaaaaggaacggcggccgtaaggagctttctcccggaagcgtctgcgcgtgagctggaggcatacagaaattcatacggcatatggcacagcacggaagactatttttcatatgtaaaatacagcctcagcactctttccgctgaagaattgagccgaatctatgaagtggaagaaggccttgagcacagaattctgcgcaccatcagacaagcccgatcctatcgcgaaatgatggaacgattgaaaacaaaacgatacacgtggacgaggctgcagcggatgaacacgcacattctgacacggacgaaaaaagaagacatgcatcggctcttgcagccttcaagcgctccttatatccgtcttctcggaatgacgaaaaaaggacaggcgtacctgtcggcaaagaaaaaagagcttaccgcacctctcgtcagcaagctctcttctttctctcatcccgctctggatctggacatactggcgggacgggtttacagcctgccgataaacgaacctgaacgcacattgtttgagaaacaggaattttcacaagcgccgatccgctatgatgaagacgaaaagtgttttttgaatgcgtaaaaaaagcacctgtctgtatcaggtgctttttactttcagctgatccaaatagtcaagtgcgtcctgcatggtgtcgacagggacgattttcatatcggacttgatcgctttcgccgtttttaccgcatttttgtaatcagaattttcagctccgttttgattcggcgcaaagaaaatatcttttcccgctttgtctgcggcgacgactttctgatcgattccgccgatcggtccgactttgccgtccacgtcgattgtccccgttccggctatattatagccttttgtttcgtcaggttttgtcagctggttgtaaatttctaaagacatcatgagacccgcagaaggcccgccgatgttttcaatgctgaaatgaagatccggcttcactttcacgttccggtccgtatataatgcgacaccgattcccgctcttttcgggtcgtccgggaatgatttcagcacaatgtcaacggtcttttctttcgtgtcccgttcaatgtgaaacgttactttttcccccgcttttttgctgctgatataatcaatcagcttttcagcggattcgtatgttttcccgtccgcgctgatgattttatcaccgacctctatttttccttttgccggcatgtcagagacgactgagctggcataaatgccgttaaatgagtatttcacctgtttcccggctttttgataagcggcaatgaccgcgttttcttgggagcttttcatcatttgcagctggcgcttcatataatccgagtccgattcgccctcttcttttatgctttcatcagggacgatttcttcgtaaggatgcactttcgcccaaagatatgtatacggattggcggggcctactttgacagtcatcaaggaaaggcttcctttttcaggatagcctccgtccaccttaatcagcggtctcagctctgatgcttctcccggctgtgtgatgtaatacgggagcttaataaatgtaacagcgattaataagatcaggatgataaacacccagcgaaaatgttttgctttcatatgagttagccctcccagttctctatttcttgtttaatccggccgatcatccggtctgcggcttcttcgcccgctgtgatcatatgatcaatgttggcaaaagaacttgagctgaatgattcaagagaagggcggatcatgacgtctgcggcaatggtctggtgacggaccaattcattttgcagtatatccatactttgcatgattacatcaaaaatatgtgccgccttttccgtttttttcacccgggatacgtcagaggcgatgacgatatcagcacccatatcttttacggcggaaaccgggattctgtcgaccaccgcgccgtcgactaacatacgtccgttcattttttgcgggacgaaaacgcccggtatgctgatgctcgcgcggacggcttcggacactgaacctttcgtaaaaacgagtttttcgccggtctgaaggtcgcaggccacgatgccgagcgggatccgcagttcttctatcggcttgccgtacgtataggcatgaacgagctgcctgatgcggtctccttttaaaaatccgagcttcggcatcgtataatccgcgtacagccgccgcttaaatgctttagcgacttttttcatcgtggccacgtcatgcccggccgcataaaagcttccgactaatgctcccatgctgctgccggcaatcatatcaattggaatctgatgcttatgtaaactggataacactccgagatgagcgatgcctcttgcccctcccgaacctaacgctaacccgattgtaggtttggccaacgcgacgaaccccctaatagacatcctatacatgaattctatggtctaaattgaacccctatgctcgtatattagtacaggatgacaaataggtacttgcccggccgcctttaaggtctgttctatattttatcatgatataaatgtcagtgtgcaattttagcatcggggaggtaagaatgaatttgtctaagtttcatacatttttgatttcattgtttttcatttttttgacggctacggttatttcacaccctcaggcctcattcgaagcctccaaaaccggtctttccatgtggtgggaggtagtttttccttcattgcttccgttttttattctatctgagcttttaatcggattcggcattgtcaagtttgtcggccttttactcgaaccctttatgcgtcccattttcagagtgccgggggtcggcggatttgtactggctatgggcatggcttcaggcaatccggccggcgcgaagctgactgcacggctgcgccaggataaacaaatctccagagtagaggctgaacgcctcgtctcttttaccaattcatccaatccgttatttatattcgctgctgtggcagtcggcttttttcataacgcgtctctcggcattctgctggcatcggctcactatctcggaaacatcgccgtcggcctgacgatgcgttcatacggacggaaagaagaagcggcgtataccggtaaaaagacgatcgctctcccttctctgaaggaagcatttctggccctccacaaggcgcggctttcggaaaaacggccgctcggaaaaattttgggcgacgccgtcacctcttctgtacaaaccttgctgatggtgggcggttttattatattgttttcggttttcagccggttattatcaatcgtacaagtcatggatgtgctttctgtatttacaaacgcgctgctttcgctttttcatcttccggcaaatctggacatccctcttatcagcggaatgtttgaaattacacttgggagcaagctggtcagtgaagctgatgccgccttgctgccgaaagccatgattgtgagttttattctcgggttcagcggcctttccgtacaggcccaggtagccggcattttatcggaaacagatatccgctttaaaccgtttttcgcggcgcgtatccttcagggcatttatgccgcactctttattctcttactgtggaagccgctttaccttgcgttggacaaaccttaccagtccgtattcctccctttccgcgatcaggacgcaggatctgctgccgtcagcggctggaatacacttgttgaaaccggtcccgccatcacgctgacagctctcgccgtatacgcattgatttattgttacaggctgtcagcacggacaaaaaaaggatgagacgccaatcagcgcttctcatcctttaaatttctgcatcagcgcctgttcaacttccggaggaacaaactctgaaacaggcccgttatattttgcgacttcttttacgatgcttgaacttaaaaaagagtactgattgttcgtcatcataaaaaaagtttctattgattcgtcgagcacgcggttgacggaagtcccctgcatctcatattcgaagtcagaaacggctctgagccccctgataatcgccttcgcccgcttttttttcgcatagtcgattaacagtccctgtgacgtctcgaccgtaacattcggtatgtcttttgtcacttctcttaacagctcacatcgttcctcaactgtaaacagcggctgcttagaagaattattgagcacgcatacgtacacctgctcaaacacgtttgccccccgtctgataatgtccagatgtccgtaggtaacgggatcaaaacttccgggacatacagctatacttgccacatcattaccccctatttcggtatatcgtcactcctgtaagcccgtaaatttcccttcttgttacagaaagcgcgccgacggcttcaggaagcgcaacggctttatcatgctcggctacgacaaaaccgtcttcattcagcatgttctgctcatcaatcatttcgataagcgctttcagcttttgttccttatacggaggatctaagaaaattccgtcaaaacctttttcccgtttcgccgcggcatagagggcccgctctgcatcattgcggtatacttccgctgaagacagcagatcaagcgctttgatattcgcttttaccgtttggatggctttgaaatcacgatccacaaagatacagcggtcaaatccgcgcgacagcgcttcaatcccgagaccgccgctccccgcaaacaaatccagccccgttcctccgtcaaaatacgggccgatcatattaaaaatagactcttttactttatccgtcgtcggccttgttgatgtgcccggcacagcctttaaggctcgtccttttcttgaaccggaaattactctcattattcacaccactttttctgaaaactttgatgtttctcatcggctgagccgttatgtatcaaaacaatccctatcttatcataaagcattctttcaaacaatgaacgtgaaaaacgtgtatacatattcacattcctgtcaagactacgtgtaacagcatcaatgaatgatgttgttgccaaccgcggagaagacttacgtttccccataagttcttcctccggtttctcctctcccttttccttctccttaacttgttaaggaatagaaggaccccgcaggtatctgcggggatttttttatatgccgattttataatcgtactctttcgctttatcaagctttgattcaaattccagctttaaaaaaggtttataagaaggctctaccttcttcacatatgaataagaagaaatcttttccattgttttttcgattaggtccatatcgcaatacagcacaacgtatttcagccgcttggaaacataatgaacgttgccgaattttctcagcattttgctgtgttttaaggaatgcagatatacgattatgccttggcgcttattttccatcatgatcacccgcctgactttctgttcattttatgtaaaagacgagacggccgtctcgtcaggaaactttgcatccgcagccgccgccggaaccgcacccgccgccgcaggatgacaggccgtcaaaataaggattccccgtcggaacttttacatgctccgagacggccgttccgagttcaatgctgatctcgtcaagcagcgactgaagctcagtctccgcttttttaaattcggccaccttatcgtttaaatccagttcccgtttcatttctctcatttttcgggaaatctctctataatcaggatggtatttgccaaagcgctgcacatcctcatactgctctttaacgctcataaaagaacgaatgatccgccctgcctcttcatcttcacggagacgcttgtaacaatcgcggtaattttcagccgtctcagactgcagaatcatgccggcaagctgctccgcttcactttgaagcttgacggactcaattgttgcatacataaatacgcacctccagttgctagtttaccatgaaaccacccaattggaaaatgcggcgtttaaacgctttttaatcctgtgaacgcatggcgtgaaccatctgcatcatcatctgcgccatttgaatcccgtttgagaattggcttacccgatgcggtatcgtcttttcataaaaattcatcatgtcaagctgaaaggaattgagatcgtccggttttctcgcaagtctgcggtaccagacgggacgctgccgtataaaccgtttccgttcctcatctgcggatatgaattcctgaacctcttttcgcatacacgatccccttctttaatcctttctgaacgaaaaaggatgttgtccggagccttgccggggctgcttcgtgctgctccccgaaaattggcttaaaaggctttgcaatgatgaaatggattggctcattttattgatctgctcattcatttggttgatatccatctttttgacggcagtgaccatttttgaaacgaaatcgtttttttcagctggttcctgtttggtttccgcgtcggaagaaggctgaacggcctcgtctttaaaagggtcccatatcggatcatcctcgcccagaagaacccaattttcatagacttcctgccagcttctttgttccttgcgaacattttggatcagtttgggatgcttttttacgaattgtttaaaatcatcgattgattgccgtgattgctgattcgccacaattctcaccccctccgaaaagttttgcctgctataatgtatcggttcatgcgccttaatgttcgcctaaattgagaaaaaaagcaggtatatataaaaattgtttttttcgccaggagcaccgctcgcgaaaaaacataaaaaaaccgcgggggacgcgcccctctgcggttttttactgccaaggcttaatgaagttttgcgtataatacttctgatcaacgccgacaccgaggtgcgtataatccgggcttaacagcgcctttctgtggccttcgctgttcagccagccctccacggctgcaggaccgtccacatagttgtaggcaatattttcaccggcctcccggtatttcacatcgcctttttccaagcggtccttcagagtcccgtatttctttgagacgtgagagaaatacttgttatccttcatgtccttgctgtggccgaatgccacttttgcggcgccttcgtcccatttcagccttgcaagtccgtgttttacgcggatgacatttgtaatatcgagaatctgctgttcactcgctcgttcaatatcgttccattttttatcagaaacaggctcgggttctgtcagctttcctctgtacatgacttcatacggcctttgtttcacaagtgtttccgcatcaaatgccctgatgcttgacagattcccgtcaaatttgtccatgtacagctgaacatacattccgcctatcttgacggtgggacgggtattgatatcttcttcagaaaactcgaaccgatacgtgtttcccttgtcagtcacattgacaaaaggagaaacctgcgtcgttttaaaaacttcgccagtcgattcgccgatcttaaacggttttgcgttgatgccgcttcccgaagcgtataaagtcacggctttatcattcaaaataccgacttgtacgtattggtctttcccctggttgtacacccaccactcgtaatcgtaggcagaaggatctttccgggacggttccccaagtttctttttcacatcggcggcagatttccccatgagagaaagcagtccggatgacggcattttcagccgttttccgctctcttcttcattggaaacctgaggctcctcctgatccgtctttttctgaggagccgatccatattgtataaacagaacatacgctccgtaaataagcaaaaggataacgagagcccttgcgatatttttcaacctctcacccccatatgttcaaaccgttctgtttttgtttactcttatacagtacagcctatttgcatcgtccgtgatttatgtttaatggataaacccctccggaccgccgtcttcagaaatgtcagacagcactcggcctgcttgctcatttgattgctcggccaacgaaagatcgccgagcgtaacaatgccgaccagttttttatcccttgtgacgggaattcttctgagctgatgttcagccatcaaatggagcacctcctccacagaggcgtcttcctctgcactgataacccgctctgtcattgcgtcggttattttttgagagttcggcttttttgaagcaattccccgtaatacgagatctctgtctgtcacgatcccgacaagtgtggcgccgtcttcatccactatcggaatggcgccgacatctgcgtctttcatcttcaccgcagcttcatatacattatctaatactgtacaatattgcaagtctgacgtcatgagcttattgatctttgtcattgcggaattcctccttttttctgctactattgtcgtcaaatttttcattttgcatactttcaccgtatgaatcattgaaagtgtaacgctttcatactatgattgtcaggaaagggcatttttaaaaggagggggaaggtttgaagtttgaaaacagcggtcttgaaggggtaacagcggagctcagccgcttgaatgatctgatggaaggtaaagggctcattctggctggacaatgggattatgaaagagtgacttacgacaaaaagttttcagtacctgaggggacattttatctgcggattcaaggaacggcaaaagagggcgatgtcggcggcagccgggccgtgattcagctgaaggcccctcttttaggaaagcattattatccgcacggcgtagaatacggcagcgctgaagaatttccggaacatgtcgtcgctgaaagcaaagctttactgcttgaattggaagagtcattaaaaacagtgcaaatgtaataaaaaagtacagcatattctgctgtactttttttcatgagacggtatgctcgatatacggcggctctgacagcgtatctttttcccgttccgttctgacccactgaaaaaagatgacagccaaatatgttccgtagaccgcctcttgaatgattttcatcagtactgccccaagctgctgatcttccagaggagggagcgtgttaaacatctccggtccggataaagggatctcctccagcaaatctaaaggaacgcaaagcttcattgcttcggcccaagccgccggatctgtatacgtggcatacatgggcgccccgctgaacataatgagcgcgcaggccggcgttaacagaatcccgtctgccataatataccccagcttcattaaaccgctgagacggggcagaccgtccaccttatgcacaagcggccaccacataaaaaacgccgttacaaagatgagtccgttcatcagcgtgtgatacagcgaatccgttttgacgaaatcaaatataaacgggatgtgatacagtgaaaaaataccgttaaacagcactaatgcgataagcggcattgaaaagaacgaaaacagcggctttacgacaggacggaagatcagttttttccatgcccagccgggaattccggaaatcaacagcggcggtacgactaaaaacagaaccgccatctgcgtcatatgggcgctgaacatcacatggcccaataaatcaaccggacttcccgcagccgcgtaaaaaaatagcgcggaaagcacaaacagcaccttctccttagcggacacacgtcctttatgccggctgcaccagtaaaagtaaacacctgttatcacggcagttatacaaaacagatatgggctccacattgcgcgaaacccgaacatttccaaattaatcaaatctctcactccccgccgccccgattaccaccaaataatcgtgacaaatgcaagcacggtgataaacgcgacaaatattcccgaatacagaaataatgacggcgcttcatgccccttctggctcatatgcataaagtaaaacagctgaaagatgacctggatgaccgcaagcaggatcagaaacggcatcgtaaaccatccggcaatgccgtcagcagccaccgtcaaaaacgcgacaagcgtaaggccgatcatcaaaccgaaggatatgacctgatatttcatctcctcggcatttttcttttttcgatattcgagatccgtactgacagtccctctgtttttgttatcgtccatcgttatcccaccatccccatcaaatatacaacggtaaagataaagacccacacgacatcgataaaatgccaatataagctggccacataatatttcggcgcattataaaggctgagccctctttttgcattccggatcatcagcgcgctgatccacaacagcccgaacgccacgtgtgctccgtgtgtgccgacgagcgtgtaaaacgctgagccgagcgcagagcttgtaatggtaaagccgaattcgtgagtgtaatgcataaattcatagatttctacccctaaaaatcctgctcccaataaaacggtaaccaaaagccacacctgcatttttttaaaggagaaatttttcatatgatacatcgcatacacactcgttaagctgctcgttaaaagaagcatcgtcgcgataaatacgatcggcagctcaaacatctcagccgttgacggccctccggctttagattcccgtaaagcaaggaatgttgcaaatagcgaggcgaacagaaccgtttccccgccgagaaacagccaaaatcccaaaaacttatttttcccctccagcgttgctttttcaggagaagccggaaaggtttcagccgtcattttttcctgcagctgcattacgccttcacccctttatcatcattcggcagatcttctttgtgaatatgatagccgtaatcatcgaccacagagcgaagcagcatggtaaagaatgtgatgccgagccctatgaagataaccggaagcccccatgaataatcggagtggtataaaaacccgaacgctgcgacaaacagcccgaaagatatgataaacggcatgatggagccgttcggcatatgaatgtcctctacaggctctgcaggcgccatcccttcatttccggcctgcttttcaatccacagcgggtcaagtccccggacaaacggaagctgtttaaaattatattccggcggcggcgaagagaccgcccattcaagcgtacgaccgtccagccacgggtcgttcccgacgtatttcccctttattgaggtataaataatattgacgacgagtaaagcagccgcgcccgccatgaaaaacgcgccgattgaactgatcaggttgccggtatcaagcccctggccgggcagatatgtgtaaacgcgccgcggcattcccatcaaaccgaggaaatgctgaatgaagaaggtaagatgaaacccgataaaaaataagacgaacgaaattttccccatcgtttcatgaagcaccttcccgaacattttcggccaccagaaatgcacccccgccaggatgccgaacacaacgccgccgataatgacatagtggaaatgcgctacgacaaaatacgtatcgtggaactgataatctgccgctgcggccgccagcatgacacccgtgactcctccgagtacgaaagaaggaataaaggcgacggcatacagcataggcgtcgtgaatttgacatttcctccccagatggtcaaaagccagttgaaaattttaatgcccgtaggcaccgcgatcgccatcgtcgcaaccgcaaatatcgcattagcgatcggtccgagtcccgtcgtaaacatatggtgaacccaaaccatgaacccgagaaagccgatcagcacgatcgcgaagaccatagacgaataaccgaacagacgtttcctcgcaaatacgggaatgatttctgaaaaaatcccaaaggcgggaagaattaaaatgtatacttccggatgcccgaaaatccaaaacagatgctcccagattatcgtattgccgcccaattcaggattaaagaaattcgttccgaacaaacgatccagcatcatcagcgccaaaccgacggtgagcggaggaaatgcgaataaaatgagtgccgacgccacaaatgtcgtccacgtaaacagcggcagtctcatatacgtcaaacccggcgccctcatattaataatcgtggcgagaaagttgatccccgcaatcagcgtacctaagcctgatatttgcaggccgagcacgaaaaagtctatgccgtgccctttcgaattcagcgcaagcgacgcgtacgacgtccagcctgcatcaggagcgcctcctaaaaaccagctcagattcaaaaagatgcctccgaagaaaaacagccaaaatccgagcgcattcagaaatgggaacgatacgtcacgcgccccgatctgaagcggcacaaccgcgttcatcagcccgaataacagcggcatcgccgccaggaagatcattgtcgtgccgtgcatcgtcataatttcattaaactgctgagcacccataaaatcgttccccggcctcaagagctgaatcctgataagcatggcctcaagtccgccgacgacgaagaaaaatcccccggcgatcatatataaaatcgcgattttcttatggtcaaccgtcgtcaaataatcccaaagcaaagagctttttctttgctgtcctgtaagcgtattcatcatttacgacctcccccctgatatctccctgtcctcacttgttctccgctttcagcccttttaaatattcatacagcgcatccgtttcagcgtccgagagcttcggataagtgcctgtcattttattgcccggtttaatgctgtccggatttttcagccaggcttttatattctctttattcgcatccttaatgccggccactttgacccgttcaccgaaggtagcgaggttcggagccgttcttgccgcttcagcccgtttatcattgggctcaaccgcatgacagctcaggcagtttttttccttaaacagctcttctccttgcgcggctaaaccggaatctgttgtatgcttataatttttcatcgctttcgtccattgtttaaattcttttgacggcagcggtttcactttgaaatccatcagcgcatgtgaaggtccgcacagctctgcgcatttcccgaagaaatattctcccgcttctttgctgcgtttagaatcgaaggtcagaaagaaagtattgtcattatccgtattcgtatcgatttttcccccggctgacggaatccagaaagagtgtttcacatctgaggacttcagcttgaaatagacgcgttcatctgtgggaacgatcagctcctgacttgtcacaaacccgtaatcaggatactcgaattcccaccagtataaattcgcccttacattaatcacgagcgcatcctctgctttacggtttttcttatccatcggcgacgtatccgccagcgccaatgtatcgatgacaaccggaatgacaagaataatcagaagcaggatcggaataacggtccaggtgatttctaaaaaacggttcccctccacctgtttcggtatcgtgtcttcccctatacgcgaccgtctgaatctcacaatgacgtaaaagaaaataactgctacgaccgcaacgacgacaaccatgataagtgtgctgagcaccgtcagatcatattgtttatcagccacttcgccggcaggcttgagtgtggacagaaacggttttccacagccgctcaataaaagcggcactaaggctaataatgataaaagacgccaacgctttaacatttcacccaaccccttttttgaatcagtacgagatgcacaagcagtaaatctgcttccagccgaaatacttcttttcctcatttcttaaaatatgagattttttacttaaaattccatctatgtataaaagcaaagccgcctgattaaacaaaaggtcaaggcggcgtttactagttgtcattgtttgttttggcgatcaaacaagctcattatttaattaaaacagcgtaaagaccaccatcgctacaaaataaatggtcatgtaattaagcgaatagacaaacataagagttgcccacttcatgatgtttttcatgcggaatcccatcagtccgagaacaagccatccgacattcagcaaagtgccgagaatgacgatcggaagacctagactgccgaggaaaaatggaagcggcagcaggcatgcgacccagacgataatctgtcttttcgtcacttcaaagccgtgcactaccggaagcatcggaatattcgctgctctgtaatcttccgtcttcttaatcgcaagcgctaaaaagtgcggaatctgccagatgaataaaatcatgaataaaacccacgcgacaacaccgatgtgcccttcaaccgctgtccagccgattaacggcggcacggcgcctgatacacttccgacaaccgtattaatcgtataacggcgtttcgtccacattgtataaagaacaacgtacgtaaacacgccgataaaaccgatgactgctgccatcacggtggtcatcaaaagcatgataagtcctaaagcaatgagtaaaattcctgaccacagcgcttgattcggctgaatctttccggttaccgtcggtcttactttcgtgcgttccattaaatgatcaatatcacggtcgtaatagttgttaaccgcacaagaaccggcgatgatcaaagaagatcctattaatgtaagaagcacggtgtttaaattgcctaaaaaactcagaccggatatatgtaacgcaagccacatgccggtaaaagtcgtaattaaattcgaattgacgattcctattttgataagcgaaaggaaatccttccatgccgtcgtctcttcaatctgtccgtctatagctgtatcgtttaaaattctggaattagccataacgtaaacctcccttacaaacctaaagcaggttttttaagacctgcaactctatcatacaagataatgacctgtaaaaaaacatcctcttaaatattaaacgagaaacaggaatttatttgtgaactttttatgaattttaccaaatccgccggtttcataataaagcggttactttatttctatcagacccatctggaataatcaaccccattatctaagaagtcctgattctattatatttttgtgaacaaacagaattgagaattgccacaaaacacatattcgcttacacttggtacgtatatcattttgtccagtttgttaagaaggtgaatgtaaaatgaataaagctttgaaagcgctcggcgtgctgacgacattcgttatgctcgtcgtgctgatcggcggcgctcttgtcacaaagacaggatcgggtctcggatgcggaaggcagtggccgctttgccacggccggtttttcccggagcttaacgccgcttctatcattgaatggagccacagactcgcaagcggtgtctcaatcgttctcgtgctgagtctcgctttttgggcatggagaaaagtcacgcctgttttccgtgaaacaacctttctcgccattatgtccattatctttttatttttacaggcgcttctcggcgcattagcggttgttttcggatcaaatgcgctcgttatggcgcttcatttcggcatatcgctgatttctttcgcttctgttctgattttgacgctgctcatattcgaagctgataaatcagacaaaaagctcgtcaagccgctcagaatcggcaggaaaatgcagtttcatatgatcggcctttcgatttacacgtatatcgtcgtttatacgggagcttatgtgcgccatacgaaatcaagccttgcctgccctgacgttccgctttgcagcaggctgaatcacgggcttccgtcccattttcaggaatgggtgcagatgggccacagaacggcagcgctgcttctgttcgtatggattcttgtcgcttttgcacatgcggtgcgctcctacaaagaccaaaaacagattcttgggggctggatagcggctcttgcctttgttgtattacaggcgctctccggaatcatggttgtttattcagaaatggccaccggctttgcacttgcccattcgctctttattgccggcctgttcggcgtcttatgctatttcttattattaatcgcccgcttccgctatgaatcaaaacagcggtacatctgaggcacatgaaaaggccgaagcattagagcttcggcctttttacatctaaaaaacctgatcgcacacgagggcggatcaggtttttttatgttcattttttacgctttttcaatttcgatcagtaaatcgcctgtctgaatcggttcaccgtttttcacatgaatctgctgtatcgtcccggagaacggcgcctgtaccgtcgtctccattttcatcgcttcattaatcatcagatgatcgcctttattcacctttgccccggtttccgttaacaatttaatgacggttcccggcatggatgccgcaatgtggcttgggtttgtccgatctgcttttaatttttcctgtacggatgatttaatgctttcatctttaatgaccacctcgcgcggctggccgttcaattcgaaataaacgacacgtgtcgcatctggctgcggttcaccgatagatacaagcttcacgatcagcgtttttccgcgctcgatttccacttcgatttcttcaccgagtgtcatgccgtagaagaaagtcggtgtgtctaatacggaaatatcaccgaagcgttccgccgttttaacatattcagtaaacaccttcggataaagagcatacgcgattgcgtcctgatcactcaattccatatgatgtgtttctttccattcttctttaatgccttcaaaagataccggttcaagcagctcacccggtcttaccgtgatcggcgtctgccctttcagaacgagcttttgcagtttttccggaaatccgccgtgcggctggccgatctgccctttaaagagctcaacgactgaatccggaaaatcaagcgtttcgcctttatcataaacatcttgttctgttaaattgttttgcaccatgtaaagcgccatatctccgacgactttggaagaaggtgttactttcacgacgtcgccgaacatgcggttgacgacgctgtacatgtctttcacctcattccagcgatcaccgaggccgactccttttgcctgctgctgcagattgctgtactggccgcccggcatttcatgattataaatctcagtatgcggagacttcatcccgctttcaaattcactgtaatactgacggacggattcccagtattgcgacagtctttccacctgccggacatccatttcaggacggcggctgtttccttcaagggcatgataaaatccgcttgcgctcggctgtgaagtcagacccgccattgagctgacggcgacatccacgatgtccacacccgcttcaacagctttggcatagagaaagacgccattgccgctcgtatcatgcgtgtgaagatgaacgggaatatcaatcgtttccttcagcgctgagacaagttcgtatgcggcttgaggtttcaaaagaccagccatgtctttaatgccgagaatgtgcgcaccagacgcctcaagctctttcgccatagaaagataatattgcaaatcatatttcgtccgggtcttatcaagaatatctcccgtgtaacaaatcgcagcctccgccacttttccggtttcacggacggcatcgatggccagcgtcatcccttttacccagttcaggctgtcaaagatccggaatacgtcaatacctgactccgctgactgccggacaaatttttggatgacattgtccggatagtttgtataaccgacggcatttgatgaacgaagcagcatctggaacaatgtgttcggcacttccttgcgaagatcttcaaggcgcttccaagggtcttcttttaagaaacggtacgctacatcaaatgtcgcgcctccccacatttcaaggctgaacagttcaggccacagggcagccgtaggattcgcgatttttttcaaatcattggatctgatccgggttgcaagcagggactgatgggcatccctgaacgttgtatcggtcaggagcacggatttttgctctttcacccagtctgcaagcccctcagcgcctctttcatcaaggatctgtttcgtaccgcttgccggcttttccccgatacctaacgtaacggtctgaggcttatcaaatgcaggtttttcttttttcccgattcccggaaaaccgttcaccgtgacattgccgatataggaaagcatttttgttccgcggtccttctgttttgggaaaacaaacagctcaggcgttgtgtcgataaacgatgtgtcatattggcccgtcaggaatttttcatgctttgccacgttttcaagaaacggaatattggtcttaatgcccctgatcctgaattcctgcaggttgcggaccattttcgctgatgcctgttcaaacgtcagcgcccatgtcgacagcttgacgagcagtgaatcataataaggcgtgatgacggcgccctggaagctgtttcccgtatcaaggcggacgccgaagccgccgcctgagcggtaagccataattttacccgtgtcaggcataaagtcattcagcggatcttcagtggtcacacgtgattgtatcgcatacccgtttgtaaaaatgtctttctgctcagggatattgacggcacggctgtgcagtccgtggccctgcgcgacgaggatttgcgtctgaacgatatcaacccccgttatcatttccgtaatcgtatgctccacttgtacgcgcgggttcacttcaataaagtaaaattcaccgcccgctacgagaaattccacggtccccgcgttgatatagccgacatttttcgcaagcgccacagccgcttcacagatttcgtcccttaattcaggctgcaaagatacactcggcgccacctcaatgaccttttgatggcgtctctgaacggaacagtcccgctcatacagatggacgacattgccttctttatctccgatcacctgaacttcaatatgcttaggattttcgatcagtttttcaacatacacttcatcgtttccgaatgcggctttcgcttctgatttggcccgctcaaacgattctttcaattcgctttcgcttcggacgattctcattccgcggcctccgcctccgagcgatgctttaataataaacggaaatccgtggacttttgcgaattgttcgacatcttttaatgtttcagccggtccgtcactccccggaataacggggatgccggctttttctgcctgctccctcgcctttaccttatctccgaacatatccaaatgcgctgacgtcggtccgataaatacgatgccctcttcttcacagcgtctcgcaaatcggatattttcagagagaaatccgtagcccggatgaatggcatctacgccgtttctttttgcgatctcaataatcccttcaatatcaagatacgcgtcaatcggttttttgccttctcccactagataagcttcatccgctttatagcgatgataggagcccgaatcttcttttgaataaacggctaccgttctgatgttcaattctgtgcacgcccggaaaatccggatcgcaatttctcccctgtttgctactaacactttttggatggattgttgtgacaaacttttctcccccttggcctaataaatatgtagtttataataaaggaatatccgtcctgtgtatacacttgttttttagagatacacagttttttccgtctgccgtctttttacccccttagacggaacgggctccctctttttcttcttttctgagtacttgacatgcatgctgacattcaccaatataccggcgctcgttaataacaaaaacattgatgaccctccgtagctgataaacggcagcggaacacctgtgatcggaattaaaccgctgacaccgccgagattgataaaggtctgaatcgcaatcatgctggatatcccgattgccaaaaggctcccgaacggatcttcacattttctcgcaatataaaaaccttttaacacgacaaaagccagcagtacaatgacaaacaggacgccgaaaatgccgagctcctctgaaataaccgccataataaagtctgtatgcgattcaggcagataaccgtatttttgaatgctttctccaagaccgagaccgaaaaaaccgcctgagccgatcgcataatacgaatttataatctgcaggcctgatgtgctggcgtatttaaatggattttcaaggctttcaaaccggctcatacgcccgggtgtcaaaatatcgtcccatttcagatagatgatcgggctgacaaggagcaatacgattcccgccatgagaaccagcctgagcagggtccttccgctgaatcccgaacacataatgacgcaaaacgcgatcagaccgataatcatcgccgttccgaagtcgggctgaatggcgataagcgcacaaataactacggtgacgatcaccggcggcgcaacccccgtcaaaagctgatcgatgtagctttgtttctttgcgtataccgcggcaaggtacagtatcagggtcagcttgacaaattcccccggctgaatggccattccgccgattttaaaccagctttgcgcgtttccggcaacatgtccgaaaacaaacagcgcgcaaagcgcagccactgacgcaagcagtatgaatttctgaatcttttgatgggcgaacactttgtacggaaaaacggccgcgatgataaacagcacaaaccccgcgatgacggcgaacagctgccgtttaaagaaatagtcgctgctcacgccgtaacgcataacggcggtaatcatgcttgagctgtataccattaccaatccgaaacagcacagcagaatgatagcgcatatcaatgaataatcgtaagattttaacattcttttaaacataacatcctctttcctgcttaaagcttacgtttaatacctatagcgtattatattttactataattcataaacaatttacgcagtttctttatagtttttcggatgaaatgcagattaagagaccgtcttacgaaaagaagatgcaaaaaaaacggtttacggttataaaaaaacccaaaccgttgaatagtttgagtttgatcatttattttcctgtaaacgcgtcatgcaaagcagacagttctctttcaagtctgtccagcagctctttgccgtcgttttcgtcaactaatcccaggcggacagcaaaatcgatttccctcgacagtccgaacatctgagtatccaagacctcttcatacagaggacattgaggcatcgttaagttatccatttgtactcggatcagcttcaaaatcttctcagcatctaacttcaacagctcgaatgctttctgctgatggtcaactataatctctgaagccaaaagtatccctccgttccccaggcgagtacctaattcttctatttatcataaagggtatcagatgaaattgcaagagaatttaagcagatgttatgataaaaaatgtttcaaaaaatactcagcctgtatttctcagacatgatttccaaaagcttcacacccgcgatgctgttgcctttttcatcaagcgccgggccgaatataccgattccgaagttgtacggcgaaatgcccatgattcctcccgaaacgccgcttttagcgggaatgccgaccttgatcgcgaattccccgctcgcattgtacatgccgcatgtcaccataaacgtcttgcagattctcgccacatcttttttaatgacctgctccccggtttccggatgcttgccgtcaagggcgaatacacagccgattttggctaaatccagactgctcatcttaatcgcgcactgttttgtatacaaatccatgacctcttcaacatcgcctttaaaaatgtcatactgcttcatgtaataacacatggcccgattaatcatggatgaactgaattccgattccgcgacatgtctgcaatatgtaatgtcctgattattcgcaagtcttctgatgaatccgagcaggtaatccaggcggtctttcggcgaatgccctttaatgaaacccgtaacgatgagagctcccgcattaatcatcggatttaaaggcttgcccggattcactgtttcaagcttaatcatggaattaaacgggtcgccggtcggctcctgacccacgcagctgaacaccttttcctttccgtaatccatcagtacgagcgccagagaaagcactttcgaaatgctctgcagcgtaaatgtccggtcggcgtctcctgccgtcagacatgtattttccgcatgataaatcgtgaccgaaaggctgtcttgttcagattcagccagagccggaatatagtctgccactttgccttcttcggttctttttttcgcttcctgaactaatgcgtccagctcttggtaatgccggcataccatgtcgatcatcctcacttcgctgccgttgtatacatctaatttgcgacgcaaagtgacaattcatgcgaaaacttttatactttaagtaaaggggggcttcaccatgagcgttattcaggtaaaaggcaatgttacatatccgattacaattgatccgagtgtctggattttcgatgaccgcaagtttccgtttgaaaaaaatcagcccgttcatccggacggctctgcagaaacccaggagcatacgcttgatccggaacgagtgatcagagaagggcgcatttcgccgccgactttaaaaagcgaaaaacgttatgaaaaagaaagactgatgaacggcagcttcgccatgaagctcggcgctgttttagcaaatgccgagccgaaagaaagcgctgtcttgtgcgcatttatttcaaaatcagaaagaaccgaagtgccgctagaaaaggcgctggacgcaatcgcgcatttcagcgatgcagggaaaccccttcaagacggcggcccggtccatttttacgtggacggagactttgaaaaaccgataacgggcgtcacagaaatcgaagttttataacaaatcggcggcgagctgtgcaaggccggatctctcacctttcacaagcttcacgctgccggagacggtttgttctttaaaccgttctaccacataagcaagtccgttgtttaaactgtctaagtatgggtgatctatttgctccggatcgcccatcaggacaattttgctgccctctcccacccgagtcaaaagcgttttgacctcgtgcctcgtcaaattctgagcctcatcaataataataaactgatccggaatgcttctcccccgaatgtatgtcagcgcctccacctgaatcgatccgattcctgccaaaatcgcttcaagttcacccggctttttcgcattgaataaaaattcaagattatcaaagatcggctgcatccacggcttgagcttttcctctttttcgccaggcaaatatccgatatcctttcccaccgggacgatgggacgcgcgacgatcagttttttataaataccgagatcctccgtctgcagaagccctgccgcgagagcaagcaaggtttttcccgttcccgcttttccgatcagggtgacaagcgggatatcttccctcagcaggagttcaagcgccattgtctgctggacgttcttcggcctgataccccatacgtgctcatcatcgaaaacgagtctttttacggtctcgcctttcttatctgtcatgccgaccgcagacgaagatcctcctaattcatctttcatcagcacaaattgattcggataaacctgatgctgctgaagctccttgactgaaatttgtttgtctttataaaacgaggcaaaccgctctttattcataaatatatctttgtacccgctatatatttcatcatggtcaacgactctgtcgtttaaaaagtcctccgccaaaagcccgatggcatccgcctttaccctgacaagcacatctttgctgaccaggatgacgaggcggccgttttctttcgtttcctcctcaaggcttaaattttttgccaccgccaaaatgcggttatcattcgttttttcgataaaaatttcttggagctggtgaaatgaccggtggttcagttcaattctgagcgttcctccgctttcaagcggaactttctcgtgcagccttcctttctccctgagcccgtctatcagcttagatacgtgcctcgcatttctcccgacctcgtccatataccgcttttttgaatcgacctcttccagcacgacggcggggatgacaacttcgttttcttcaaaggaaaaaatggcgttaggatcctgcaaaagtacattcgtatctaacacataaattttactcaagtctcagcctcctgaaataaggatcaaagcccatcgtgtgcttctctttccgcgaataacggggatgcctgctaaaatatatgatttggtgcataaagatagaaggttaattcaacaataaaataaatgaaagcattcaaggaggaaatctgacgtgcgaattcttttcattatcatacaagccttgtttatcctgaccggctgcactgctgtacaggacggccgcggccgcaatattcagaacgaatcagccgatcagcgcgatgcaaaaccgatccatgtgaaaaatacggctcctgagacagctgaaaatcccggccggacagacatcgctaagcatctcgtcgaggtaaccgaaaaaatccccggcatttcagatgccactgcggttgtactcggaagatactccgttgtcggtatcgatgtggatgacaatttagaaagaagcaaagtggagagcattaaatacacggttgcccaggcgttaaaaaacgatccttacggcgccaatgccgttgtcgtggctgatcctgatacggtttcccgtctgagaggcatgggcagcgacattaaggccggccgccccgtttcaggcattttggacgaacttgccgccatcgtcggccgtgtcatgccggaagtcccgaatgatgtgaccgacaatgaaaaagaatcaccgactcaatcgaatgatgatcagctgaaccaaagagaccagaacaagctgcagaacgaacagaacgatcaatcggatcatcatatgaaaaaccgccggtaaaaagcagcgcccgctccaaaggaagggcgctgctttctttccctttggcaggaggggcatccatgttataatgcttgtcatagtgaaagaggtgaaaatcaatgagagtaaaatgttccgtttgcgacaaaatcgaacaaattgatgatgaaacactgacagccaaacgcctccgcaatcgtccgattcatacgtatatgtgccgggaatgccatgaccgaatcaaagtcaaaacggaggcgcggctgaataccggacacttttcctttcatcccggacaaaaagcgaaaaaagataaaccgaaaaaataaaccgaataaaaaatgacccgccggaaggcaaggtcatttttttattgcggtttagctgactggctttttttggactggtgcagacggattttgtaaacgatcaaaatcaaggcggcgacaacaagcccttctccgaccggcagaaacacaccgaaaaaagtcagcactgtgcagccgagcacgagaaagagataaactgccgcagccttcaacaccggcagccgtttggcaaagccgagtttaaatacaatcaccgaaagcacgacgatcgttccgtataacagccacattcccgtcagcggatgctcatccacttggtaaagagccgcaaagaacgacagccgttcacttacttcattcaaaaggatccccctccccttttccgttcgggttctaccttttcaaattctgcaagtgattaagacattcctgctgtttttttctttttcgccgctttttcacgttcgtttttattcaggattttctttcttaaacggatggattccggcgttacttcacagtattcatcttcgtttaagtactcgagtgattcttcaagcgacataatgcgcgctttcttaatcgtagtcgtttgatccttcgtagcggaacggacgtttgtctgctgtttcattttgctgacattgacgacaaggtcattgtcacggttatgttcgccgacaatcatgccttcatatacttctgttccgggctcaacgaagatgacgccgcggtcttcaataccttgaattccgtaagatgtcgcttttccgttttccatggaaacgagcacaccctgacgccggcctccgacttggcctttttgcatcggctgatagctgtcaaacgtgtggttcaggataccgaaaccgcgtgtcagtgacagaaactcagtagaatagccgatgagtccgcgtgaaggtacggtaaagatcaggcggacctggccgtttccgttattaatcatatcaagcatttcgccttttctcgcacccattgattccataacagaaccggtatgctcttcaggcacgtcaatctgcacgcgctcaacaggctcgcagcttacgccgtcgatttccttaatgataacttcaggtttagacacttgaagctcatagccttcacggcgcatgttttcaattaaaatggacaggtgaagctcaccgcgtcctgaaacaacccatgcgtcaggtgatgcagtcggttcgacacgaagactgacgtctgtttgaagctgcgcgttcagacgctcttcaattttgcgggctgtgacatatttgccttcacggcctgcaaacgggctgttgtttacgacaaatgtcatttgaagcgtaggctcatcaatgcgcagaaccggcagcggctcatggtggtcagccggacaaaccgtttcaccgacgttgatgtcttccatgcccgaaacggcaacgaggtctcccgctctcgcttcttcaatttccacgcgtttcaatccttggaaaccgaagattttcgttacgcggaatgattttaccgttccgtcaagtttcatcaatgaaacctgctgacccactttcatcgtgccgcggaaaacgcgtccgataccgatacggccgacataatcattgtaatcaagcagcgccacttggaattgaagaggctcttcggcgttatctaccggggcagggacatgttcaagaatcgtttcatacagtgattccatattttcgtcctgctttttcggatccagacttgccgttccgttaatcgcagaagcgtagacgacagggaactcaagctgttgttcgtttgcgtcaagctcgatgaacaaatcaagcacttcatcaatgacttcttccgggcgggcgaaatcacggtcgattttgtttacgacgacaaccggatttaagttctgctcaagggcttttttcagtacgaaacgggtttgcggcatgcagccttcatatgcgtcaacgactaacagaacgccgtcaaccattttcataatccgttctacctctccgccgaagtcggcgtgtcccggagtgtccaaaatattaatgcgtgtatctttatagttaatcgcagtatttttcgcaagaattgtaataccgcgttcacgttcaagatcgtttgaatccattgcgcgttcggcaatattttcgttggcacggaatgttccggcttggtgaagcaattggtctaccaaagtcgttttcccatggtcaacgtgggcaataatcgcgatgttgcgaagatcgtttcgaagtttcacattttcatctcctaaaaaaattagataactttcatattataccacacatcctctttaaaagcgttacgtttttctgtaaactgaaagtatgacgttaaaggggatggaaatatgaaaaaattgaattggctcttattattatttgcattcgcagcagtcttcagcatgatgctgatcggcgtatcaatcgctgagaaaagcgcatggggcatcatcggaagcattgttcttgttatcgccatgatgggaagcggtttcaccgtaaagaaaaaaatgcgcgaacagggactgcttgattaaaagcatgaccctttgcaaaattccgtaaacatggaaagacaatatcttatgaagcctgaatcaaagattcaggcttttttatatcctcaaaacaggctccagatgtaaggcttatctcccccgccgcctagtcaggaagccggaaatgacagctcccattctagttacatcagcagattccctcagaatatgcagtctgaaatagtccggcatcgttatgcagaaaataccatacctcctatttcaattccatcattgtctttttatacttgtggctgtaagcaaatacacatgacaaggagagaacgaaatgaaaacatcttttttgaagaaaaccgctgtaactgccgccgcaaccgcctcagccgccttgcttgcattcagtccgcttgattctgccggcgcaaaaacgattcaggcaaatgaaccgcatgccctggaggcttccgcagagaaaacaccggaagacgcggcaaagcttttagacatcatcagccaatcgatttacgaaaaagacggtgtctattattttgacggtaaaaaagcggttgaattgggattagatcaagaacaagcccagatcattcaaaagctgtgggacagttcaaccgaatttttaaccgtactttcccaatgtattgagaaaacggacggcgaatatacatttaataaagaaaaagcggtggagcttggctttacggaaaaagaggcccttatcgttgatcagctgttcaccgctttttcccaaagtcttcatatccttcaatctgcgctgattgaagaagacggtgtgtatacatttgatcaggaacttgctgaaaaagcaggagcaggaaaaaaagaagcaaagctgtgtgccggattctttaattcactgccccaggaattgcttgaaggcatttatacagcctttcatccggctgagtaaacggattaaaacgcccggtcattcagccgggcgtttttttaaatcagcagtttaaggatcaacatgataaagaaaacagcaccgaacaaacaggctgcttttatcagcagcttcccgtaataccgttccttaaaccgcctttcttcttctgcataacaggctggcgccttcatctcagggctgccgaggtcaagcggctccttcatcatatgatataaactcccgcacttaccgcatgattcaagatgacgggaaataaatcgctccgtttctgtttcacaatcgccttcaatatataaagggagtaaatctctcactaaacagcaagtcatatctgtccgtccttccttttttccgccaagtgctgtttcagctgcattctcgccctgtacagggtgctcttcaccttcgaaagactccagtccaaaacatcagcaatctcttcgtaagacagctcttgaaatacctgtcgaaatgctgaataaaatgactgaaaatctctgacatctgaaacaatccttttcgtttattaaggcctcacccgtttagacaaacggctataaaaaaagttttacagatcggaacatttttcccctatcatttttcccgacttcatttgtcatttttttcagaataaatcgcatcattcgactcatgtctgattcaacacgtgcctctcggcttatcccccgatgccggccgccggaagcctttccgggacgattctatcaattcatcagcggagtctagttttatattgcagaatgagagaatgctggtttattataacaatataagttttcattattttcaaaaagggggatttattgtgggtttaggtaagaaattgtctgttgctgtcgccgcttcctttatgagtttaactatcagtcttccgggtgttcaggccgctgagaatcctcagcttaaagaaaacctgacgaactttgtgccgaagcattctttggtgcaatctgaattgccttcagtcagtgacaaagcaatcaagcaatacttgaaacaaaacggcaaagtcttcaaaggcaacccttccgagagactgaagctgattgaccacacgactgatgatctcggctacaagcacttccgttatgtgcctgtcgttaacggtgtgcctgtgaaagactcgcaagtcattattcacgtcgataaatccaacaatgtctatgcgattaacggtgaattaaacaacgatgcttctgccaaaacggcaaacagcaaaaaattatctgcaaatcaggcgctggatcatgcttttaaagcaatcggcaaatcacctgaagccgtctctaacggcaacgttgcaaacaaaaacaaagccgagctgaaagcagcggccacaaaagacggtaaataccgcctcgcctatgatgtaaccatccgctacatcgaaccggaaccagctaactgggaagtaaccgttgatgcggagacagggaaagtcctgaaaaagcaaaacaaagtggagcatgccgctgcaaccggaacaggtacgactcttaaaggaaaaacggtctcattaaatatttcttctgaaagcggcaaatatgtaatgcgcgatctttctaaacctaccggaacgcaaattattacgtacgatctgcaaaaccgacagtataacctgccgggcacgctcgtatcaagcactaccaaccagttcacaacttcttctcagcgcgctgccgttgatgcgcattacaatctcggcaaagtgtacgattatttctatcagacgtttaaacgcaacagctacgacaataaaggcggcaaaatcgtatcttctgttcattacggcagcaaatacaataacgcggcctggatcggcgaccaaatgatttacggtgacggtgacggctcattcttctcgcctctttccggttcaatggacgtaacggcccatgaaatgacacacggtgttacacaggaaacagccaacctgaactatgaaaatcagccgggcgctttaaacgaatccttctctgatgtattcggatacttcaacgatactgaggactgggatatcggtgaagatattacggtcagccagccggctctccgcagtttatccactccgacaaaatacggacagcccgaccattacaaaaattatcaaaaccttccgaacactgatgccggcgactacggcggcgtgcatacaaacagcggaattccgaacaaagccgcttacaacacgattacaaaaatcggcgtgaaaaaagcggagcagatttactatcgcgcactaacggtatatctcactccgtcatcaaactttaaagatgcaaaagcagctttgattcaatcagcgcgggacctttacggctctcaagacgctgcaagcgtagaagcggcctggaatgcggtcggcttgtaaacaagaaaagagaccggagaaatccggtctcttttttatatctgaaacatttcacaatggcttcaccatgatcatatatgtcttttcccgatcgtctttttcaagcttaagctgttcaaagccgcattggcttaaaaacaaaacccattcctgcctgtccaggggaacggctgaaaacatcgctttatgctcccctctcagccggcccgcaatcttttcaatgaccgcgcgtccgattcctttctcttttgcctccggagcgacggccacggttccgagccacggttttccgtttgaaggcgcccattccaaatgaaaactgacggcggcaggagcgccgtcaatctcccatacgagccacgttccattgtacatggagtatgcaagcataaactccgccgcattttttgttccgaactcttcgtttttccacaccgggtgtgcagccgccagctgctccagaaacccgagatcttcttcttcaaaatctctacctgtcagcatgtaaatagtcgtcaaagataattttatgtattgccggattgcccgcaagcacgctgtggttgtctaaaaacgtaaacggttcgccgtctgtggtcgtgtaaatgcccccgacttcgttcagcagcacgcagccggcagcgtaatcccacggcgcgagcctcatcgtaatgtatgcgtcaatgcggccggccgcaacactggccagctcaagtgccgccgaaccgtaggaacgcgttcctctgacccgttttacgagcggcgccaaaatactcgggtcaatccttctgttttccgtcacccatgtggcattgattgcaataatggcttcttcaatggaagcttcttttaaaggagcaagcggcgtgtcgttcagataagccccttttccgctgaatgcgtgatacagttcgtcctgcatcacatcataaattaagccgattttgccttttccgtcttcaaagatgccgatggagatcgcgaaatgccgcttttgatggacaaaattcatcgttccgtcaatcggatcaatgatccagacgattccgtcaagggagcggagcttatctccctgcccttcttctccgagaatccggtgtccgggaaaagttccctgtatacggtcaatgaaaaagcgttccgtctctttatcaatatttgtgactaaatcattcggatttgattttgtttcaatcgtcaagctttcctgcatggattgtctgattctcgttccggcttcttttacccattgttttgcgatatcatcaatttccgtccaatttgtcataccgtgtacctcttttctatgtatagcttattctatagcatactgataaaggcgatgaaaaagcaaggaaaatgaaaaaaatgccttctcacgtaaaaacgaaccatttcctgcggttcgtttttactattctttatccgttaagccgaatccattcttttctgagacgttccagttttcttttgctgagatcgatttgatcttcattctctttttgcatggcctcatacagggttgccaattcataatcaacctctagtctccagacagctacacggttatttttttcctccctgaatccttccttcaccacttgcctcattgtctttcgccccttccagagatcatttgttaaaaaagcatcccatttttccaatttattaatgatacttcttatatcgtatggaaacttatattcggctgtaacaacattcttaaaattgtgtgtttacctattcgttttttaccaccaatcctctcggctcaaacgttctcaatgtttttgcggccggcggcggctgtggtaaaatatgaatacttacgataaggaggaaaaagatgactcagatgcgttttacaaaagaagacttcgatacatttacaatagaaggtttagatccgcgcatggaggtgttaaaagaacaagtccgcccgaagctgaccttgttaggagagcatttcgcaccgacattgtcagcattgacaggcgatgaaatgtttccgcatgtcgccaagcacgcgagaagatctgtcaacccgccggctgacagctgggttgcctttgccaacagcaaacgcgggtataagaaactccctcactttcagatcggtttatgggacacccatatgtttgtatggtttgccatcatttatgaatctccgataaaagaggaatacggcagattgctggaagcgaagcaggaggacatcacaaaacagattcccggtcattttgtatggtcgccggatcatacgaagccaggggcgtacaagcagtccgacatggatcaggagcagctgaaaacattatttgaacgcctgcagacagtgaaaaaagcagagcttttgtgcggcattcagctgcaaaaagaagacgtgatcaacatgaacaacaatgaattcctgcaaaccattgaagatgcttttaggaagctttcctttttatacacactgactcagaaagtctcataacataaaaagcgggccgattgccggctcgctttgtctacattttgataatcgcttgatctgattgtttcgcctgtttcacagtccgataaggggaataggtgctgtcagcttcaaattggctgcagattttcttttcctccgctttcccgggaacgatttctttaaagcggcggtacgcattcagaagtctgtctcggtcagctcctttttcataggcgttttccacctgctgaaaaaaagcaatgacatccacggcctcctctgtcgtccagtcctcattcatcggatattgatattccaaatgtcttcactcctttataatcatgctcaaaataagcatcttccatagatcataaattgttctttactttctttcaagttcataatataattcatttgttttacgtttaaaaaacgggtaataaaactgaatgtaatacaaactaatccgtaggtattatgataaaggtgggaaaacaattgccgcaacatgaaacacccctgtacagcggactgaaaaagcacgcggacagacagcctgtccaattccacattccgggccataaaaaaggcgcgggaatggatccggaattcagacaatttatcggagaaaacgcgttaagcatagatttaattaatatcgagcccctggatgatttacatgcgccaaagggcatcattaaagaagcccaggatctggccgctcgagcattcggcgcagaccataccttcttttccgtacaagggacgagcggcgccattatgacgatggtcatggccgtatgcggacccggagataaaatcatcatccctagaaacgttcataaatccattatgtcggccattgtattttccggagcggtgccgatttttattcacccggaaattgacgatgagctcggaatttctcacggcattacgcttgagtccgccgagcgggctttgacggagcaccctgacgcaaaaggcctgcttgtcataaatccgacgtacttcggtgtggcagctgacttgagcagcattgtaaagctcgcgcattctttcgatgtgcctgtgcttgtcgatgaagcgcacggcgtgcatattcattttcatgataagcttcctctgtccgccatgcaggcgggcgctgatatggcagccacaagcgtgcacaaattgggaggctccctgacgcagagctccattttaaatgtgagagaaggtcttgtttccaaagaaagagtacagtcgattttaagcatgctgacgacaacgtcaacatcctatctgcttctggcttcactggatgtcgcaagaaaacgcctcgctacagaaggccgcgaccttcttgaagatacgattctgctggcggatcagacacggaaacgcctcaatcaaattgaaggcatccgctgtgtcggcgaagaaatcacagggtctaaagctgccttcagttatgatccgactaaattaatcatttcggtcaaaaacctcggcctgacgggtcatgacgttgaaaaatggctccgcgaatcatataatatcgaagtcgagctgtccgatttgtataatattttatgtattttcacccccggcgacagagcgggagatgccgaccgtcttgtaagcgcgcttacagacatttcaaaacaggcttccgccaatgactatgctcatcagcaaaccgaagttctgcttcctgaaattcctctgttagcgatgacgccaagagacgcgttttacgcaaatacggaagtcattccgttaaaagaatccgcgggacggatcatcgcagagtttgtcatggtgtacccgccgggaattccgatctttattccgggtgagatcattactgaagaaaatatcagctacatttttaaaaacttggacgccggccttcctgtgcagggtcccgaagatgcaacgcttgaaatgatcagagtcatcaaagagcaaaaagccatccaataaacataaagaagcccgaaacgaaatcgtttcgggcctttttacgctttttactcttcttcaagatgacactggcattgtccgcagcatgttccgtataacgtcgtgaccttctcatcctcaaagtaatgaatcgcttcgttacagtcttggcaaacaattgtacccatctgtcattccccatttctcagaatttgaaaacgcttaattttcacttgttgttattatattattatgtcacatttaatatgtcaaccgataaattgtataacacatttattttttacggtctttttatagctcgagggtcaatcacagtatatcctttatgacgcaatccttttacaatgtccggcatggcttccgccgtccatttccggtcatgcatcaatatgttggccccgtcccgcagataaggactgttcagtgtgatatcggtaagcgcttttttggattgatatttctgatcccaatcatacccgaaggtccagttcattttcaccataccttctttttttataagtctgtcactgtagtccgtattgcttccgaaaggcgccctgaaaaatgcgggtttctctcctattaccttttcaaccgctttattgacgccaatgatttcttcccgttgtttttgttcggaaagatcttttaagttttgatgagtcattgtatgattaccgatcataaaacctaactcatgaatatgcttaagcgctttcttattttcatcttttttcaaaaaatgtccgtttacaaaaaagatcgctgacgcattgagatcatgcagtttgtccgcaatctcagcggcatgctgatcaggcgcgtcatcgatcgttaccaatgcgatcggttttttctctttctgttcatccattttttccacagcaaagcttttcggattgatatagtaacggggctccgccttctgttttttctgtttttcctcttttgtatggtggttttcccgtttggcatgattggccgcggcttgagaatggggtttgtttgtttgcatcttttcatttgattggcagccggcgagtaagcacatacatatgacggctgcagcggctttatacatgacaatccctcctgatatggttttgctcccagtataacgaaaaaacagcgctctcacgaaaaacaatgtgccttttttacacatcggctgcgcaagttgtcacacgtattatttcttcattaaaaacggtttcaattatataacaattcagtaacaagccttaggtttttcacctctcgtgatacacttgatatagtccttataaatggatgaacccatatattatataaaacagaggagtaagatagatgcgctaccgtacggtgattcccttttttttgatgctgttcgttctgtcaagctgttcggtttctactgtcagtccattcacaaaaaaccggatcgacagcattcatcacactcaaatcttgtttttttccgatgaaaatcatatagataaagaagtgccttattacgatgcgattcttgatttagaaaagaaatatccccatcatgtcgatcaaatgaaggtttatgacaacagaaagggatgggaagaggaaatcaacacgttccctgcgctgatggtgatcaatcatcggcatgtggtcatgaagattgagggatccgtaaagaaaaaagaggatatcatcaaacctatgcagcatgtgcttgcacaatagaaacagcccccgcttttacaaacgggggctgtttctttgttacattattatttcacgatatggatcgggcttccgattgctacttcggcagcttccatagtgatttcgcccaatgtcgggtgagcgtgaattgtcattgcgatatcttcagcagtcattccgccttcgatcgccaggctcaattcagaaatcatgtcagaagcgcttgcgccggcaatttgcgcaccgattacaagaccgtcttctttacgagtgatcagcttcatgaagccgtcagtttcgttaagagacagcgcacgtccgtttgctgcaaacgggaacttagctgcaacgacttcaatgccttcttctttcgcctgtgcttcagtgtaaccgacagaagccagttcaggctcagagaatacaaccgccggaataccgaggtaatcgatttcagccggctctcctgaaatagcttcggcagcgattttaccttcgtaagacgctttgtgagccaacggaggtccgtcaatgatgtcaccgattgcgtaaatgttcggtacgtttgtgcggcactgcttgtctgttttaatgacaccgcggtcagtcatttcgataccgacttgctcaaggccgagctcatcagtgttcggacggcgtccgacagtgattaatacgtaatcagcatcaaccgttttttcttcgccttttacttcgaatgtaactgttacgccgtcaggtctttcctcaacgcctttagccatggcgcttgtatggatttcaacgttgccttttttcttcagtctgcgggtaacgagagaactcatttgtttttcgaagccaggaagaatttcatctccgccttctaaaataaccaattcagttccgaagttcgcatacgctgttccaagctcagtaccgatatatccgccgccgataacaacgagctttttcggaatttctttaagcgcaagtgcgcctgtagagttcagaacgcgttcgctatatttgaagtttggcaattcgatagggcgagaaccggtagcaatgattgcgtttttaaatgtgtatgtttgcgcagagttctcatccattacacggacagagttgctgtctacgaaataagcttccccttttataacatccactttatttccttttaaaagacctgcaacaccgccggtaagcttatttacaacagaagctttccattcttggacttttgtaaagtcaaccgttacgttctcagcagtgattcccatgtcatctgaatgttttgcattctcgtaacgatggcctgcattaatgagcgcttttgaaggaatacagccgacgttcagacaaacgcctccaagagttgctttttcaacgactgttactttttgtccaagctgagcagcgcggatggcagctacatagccgccgggtcccgcaccaatcacaagagtatctgtttcaatagggaaatctcctactaccataacattacgcctccattaaaataagttgtggatcgttcagtaaacgcttgatgtggtttaacgcattttgtgcagttgctccgtcaatcatacggtggtcaaagctgagagaaagagctaagacaggagcagctacaatttcaccgtcacggacgatcgctttttcagcaatacggccgataccgagaatcgcaacctctggatggttgataaccggtgtgaaccattggcctccggcagaaccgatatttgtgatcgtgcaagaagcgcctttcatttccgcaggtgcaagcttgccttcacgcgcttttgtagcaaggctgttgatttcatcagagatttcgaaaacggctttacggtcggcatttttcactaccggcacaagcaggcctttttcggtatccgctgcaattccgatgttgaagtaatgtttttggatcacttcatctgttttatcatcaatagatgtgtttaaaacagggaattttttcaaagcggatgttaatgctttgacgacgtaaggcagataagtcagcttgatgccttgatcagcagcaacttgtttgaactgtttgcggtgagcaacaagatttgttacgtcaacttcatccataagagttacgtgcggtgcagtatgcttagagttcaccattgctttcgcgatcgctttacggataccgctcattttttcgcgtgtttcagggaattcgccttcaggagcctgagccgctgcaggtttagctgtttcctgaggtgcagctgtttcttgcggtgccgcttcttgagccgctcctccatttgcaaagctgtcgatatcttcttttacaacacgtccgttattgcctgaacctgttactttacggatatccacgcctttttcacgggcatatttgcgtacggaaggcatggcgatcacgcgtttgttcggatcagcttccgcttggtcctgctgtcctgctccggtttcttttgcaggctctttaggagtctcttctttagagatatcctgccctgcttcagcagacgactgaacttgagcctcagttttcgcctctcctgaatcatggcttcctttaaattgaagatcttcgtaaccaggtgcgtcaaacgtaataatcgtttgtccaacagttgcaactgttccctcttcaacttttaattctaatacttttcctttaacaggtgaaggaatttctaccactgctttatcattttgcacttcagccagaacatcgtcttcttctacctcgtcgttcggcttaacaaaccattttacgatttcgccttcgtggataccttccccgatatccggaagtttaaattcaaatgccacagttttcgacctcctagttgattaagcaaattttagttatgcattcgcaagcattgaacctagtaaacagactccttcatataagagaaaaggactctctttaccgtcttttatgatgcctgattaaaattcaagaacttttttcgcagtttcaagaacgtctttatggtttggaagccatacgctctcagcaagcgagaaaggaaatactgtatcaggcgccgcaacacgcagaaccggagcttccaggctcagaatcgcgcggtcattgatttcagctacaacgttggcagcgatgccggcttgtttttgagcttcttgcacgacaattgcgcggcctgttttttcaacagaagcaataatcgtatcaatatcaagcggacttacagtgcgaaggtcgataacttcagcagaaacgccttctttttcaagctcttcagcagccttaagcgactcatgaaccatcgcgccgtatgtgatgatagaaaggtcagtaccttcgcgtttcacatcagctttgccaagctcaattgtgtattcctcctcaggaacttcctgacggaaagaacggtaaagtttcatatgctctaagaaaacaaccggatcattgtctctgatagaggcaatcaacagtccttttgcatcgtaaggagtggatgggataacaactttaatacccggctgctgagcgataaggccttccaaactgtcagcgtgaagttcaggtgtatgaacccctccgccgaatggagaacggattgtcaccggagaagtccagcgtccgccggaacggtagcggagacgagccatttgtcctgagattgaatccattacttcatatacgaatccgaagaattggatttccataacaggacggtaatcttgcaggcctaaaccgagagcgagaccgccgataccggattcagcaagcggcgtgtcaaatacgcggtcctcaccgaattctttttgaaggccttcagttgcacggaatacgcctccggcaacgcctacatcttccccgaaaagcagaacgttttcattgtttttcagttctgtgcgtaacgcatcagtgatcgcttgaatcattgtcatttgcgccatggcttacttcgactccttcgctttgtaaatttcaagttgttctttcaagttgaacgtcggctcttcaaacatattctcaatcagctctgttactttcggttttgattcgccgtcagcctttttgatagcttgtttgatttcttctttggcctgttcaatcactttgttctcttcttcttcagaccatagtcctttgttttccaagaacttgcggaaacgtacgagcgggtctttttgctcccattcattttctatttctttcgtacgatatttagtcggatcgtcaccggacattgtatgaggtccgtaacggaatgtaagagtttcaatcagagtcggaccttcaccgttaattgcgcgctggcgtgcttctgcggttgcagcataaacggctagtgcatccattccgtctacttgaacacctgtaataccgacggcaactgctttttgggcaattgtctgtgcggatgattgcttttctacaggagttgaaatcgcatagcggttattctgaacaacgaagatcgctggcgctttaaatgctccggcaaagttcattccttcatagaagtcaccttgagaagctccgccgtcaccagtgtaagtaatagctaccgcttttttaccgcgctttttaagacctaaagctacacctgcggtttggataatttgagcaccaataataatttgaggtgataaagcatttactccctcaggcatctgattacctttaaaatggcctcttgagaacaggaatgcctggtgtaaaggaagaccgtgccaaatcagctgaggaacgtcacgataacccggaaggataaagtcgtcctgttcaagggcgaagtgtgatgcaatttgtgaagcttcctggcccgctgtcggtgcatagaaacctaaacgtccttgacgggaaagagaaattgaacgctggtctaaaatgcggatatacaccattcttctcattaattcctttaactgatcatctgaaagatcaggcattgcgtctttatttacgacttctccttcagcatttaaaatttggaacgtttcaaactgcttatgaatagcatcaaattgttttttgctatcaacaattgaagtttttgtctttgcagccattttttaaaccacctcttcttttgatttaacagggttaggataccgtttagccatccgtattaaaaacagtcttatcatgctctgcaattctaaaattaatcattcagaaattcacatagcgcttaagcaaagataatgacgtttaaactgtactaataaaaaaagattttttattagtacaatatgatcaacaaccatagtttacagtaattaaacaaagccgtcaattatttataacctcattttgaaaccgcttataaaacataagatcatattgcgccaaactgtactataaaagactttaaactgtattataaaaatgctctactgtactataattaaaaaaaattacaaagagtaaattaagttatttaacttcagggcgggctttgaaaagatgccgcgggataaaaacgggcagttagcaatcgtcccgcctgccgaacagacgggacgatgcttttgtctaattattcaatacccgcccacacgatattcagcggcgtcagcacggcatgaggatgaaactcggaaatcggagtgaaaaatacatacgtaaaatcttcggctggatcagaaaacatgccgcaccaacccattccaagatgtgagaaggtgccttctgtcatgaaataatggtcaccggccggccacaaattaatgcctaaaccaaagccgccttcctctctgggcgctccgaagaagtaaaaaggaagaccgggctttatttgatttctcagcatcgcttcgactgtttttcttccaagcagcttcttatctttcaatctgcctttatttctaaacatttcagctaacttccaaatatctcgcaatgaagagtacagaccgcttgtcgctttattcggaaaatacgggtgatgacttttttccagctgtacgcactcgtgctcattgatcacacaaacttcttcttttaaagcatcaggcacataaaaatacgttctttctaatccgagcgcttcaataatatgctttgttacatactgttcgtaggatacgcctgttacttttgaaataatgatgccaagtataacaaagccggttctggaatagttccatgcttcatccactccgtactccaaaggcgtactgaccagatagtttatccattcttcctcattcgttaagtcaatgccttcagccttttgaatatccagctcaaaacttaatcccgccgtatgagtcaaaaggtgcaaaattttaatttctccgaaacccggtttatcaaacgctggcaaaatgagcttgaccggcattttcagatcgagcaaacctttttcgacgagctgcatgacggctacagcggtaaacacttttgtcaaagaaccgatttctctgattgtatcaagctgaaatgtttgcttttctttttgtccgccggtaaattcccctaacgactcagctgcaaaaacctcacctcctcttgacatcatataactcgcacattgcagatctccattgtctatcatcgtctgataatggccgttaagagcgttaatttgtttcatatcaaatgccggattgcttattgtttgtttcattgttttctccccctgtactgtatgtatcgttttcatcccttacttactgatttcttgatgaattctgacaccgttttattaaattcttccggatgtgtaatgttcggaagatgccccgctcccttaattttctttaattctgcattgctcagcagtttctgcagcctttttgtttctttctgatcaactacgctttctttctcacccgtaaggataagcgttcttgtatgaatgtcttttaaaaagccgattgtagaatagccttcttgttgatgtatcttcataaaacgttcaatagaagcatttaagaattgattactgtataaactttcatattcatgcgactttcctatagctataaaatcatttttcagtttttcctcgacactgctttcagggtcttcttcgtattcggtgtaacttccggaaagaatgagcgtttttactttttcagggtattcataggctatcctctgccctatcatgcctccccaagaagctgccgcaatgtggatcggccaagcaacccctatctcgttcagcacttcgataaaagtctgagccagcccgctcagtgtaaaatcggcgctcccctcactcagcccgtaacccggtgtgtgtatgacaattacattaaattgatctgcccactccttcatttgttctttccacatgtaagcagtggtagcaaaaccgcaaatcagtaaaattgtttcacccttaccgctcatcaatatttccatatgccgggcattttctgtgtttgccagaaaatgaacggtttccgtttcttctgtctggtaaaaagcgatgagtttttttgcggcatcgctttgattgtgctgaagggctcctttcttcagtctgctccaataatgcaaataatcgtcgagatgacgattggaagccgtgccgagtattcggaaaggactttcagcttcttccgtaacgactgatgaagcatcaaaatcggctgcaatcgctgaatctcttaccagaggcggtgctgaacgggcggataacggcttgaaatcgttttgtattttttctttttctccgtataacacgatcagctggtggccttggccgagaagcgagtgttcaaaagctttgattccggcagtattttctaatgggtgaagtccgtactccgttttcataatgtcttgaatgccgggatcaactgacatgcctccgtctttccagaaaggccaatttacagcgatggtttttcctgatcttccccccgcctttctcatacattccctccactcggcaaaatgctccagaaaacgattggcgtaggcgtaatcggcttgacccagacttccgatttctgaggagatggaagaaaacaaaacaaaaaagtctaaaggcatatttctgagcgcttcatccaaatgaatcacaccattgacctttgattgcagcaccgcttgagcttcctcgtctgttttattcataatgagagagtcttttaacacgcctgcactgtaaatgaccccgttgatttcggaataatcagcatgaattttttccgctaaattgatgacctgctgcttatctgacatgtcagcctggatataagaaatgcttgccccgtcatatcggatgctgtctaatttttcttccatgtctgctgtcattttcgatcgcccggcaatgataacgctggctccgtgatttgcataaagaaacgctgaaataatccagccgatgccgcttaatcctccgatgatgagatacaccccgttttttgcaaactttgcggccttttgccctggttgcagcgaagcgtctttatatgctgtcacccgccttttttgatcgccgtcatatttcacagactgatgatgtccggcacttaattcattgagaagcaaaggtgctttttcaatggtttgtcttgaagaaatctcaaccgttttacactttatattcggctgctccgcattcagcgttttaaaaaagcctccaatcgcggcgtaaaccggatttgtatattgacccttgtcatgtacgtacagaatgttgatgttttcttttactttttgatggatcaaagctttactcaaataaagaattgaataaaagctgtgagtcagatctaacgctgcctcagtataagctttttttgacaggtaatgaatgattgacgccggaaacgctccggactttttcatatcttctaacagtctggtgtaatgagcagactgctccggattaaatttataatgcttttcatttactatttcatattcagcggcggcttccgcataaataacattttcactgccgatgtactttcggatttcatcactcaatgaactgccgaaatcgaaaatcagtgtattttccttaggtacttctccggactttaatggcgattctatccattctttttgtaaatacaaggaatcaagcaccagcttttcagacggctctttcgtttgcgttttttctttaaaagctgcggccggcgtattacgcacatcatatttttcttctaaataagccgctaaatcatgaatattgttataatcaaaaagcaatgtcggatacaattgtgtatccaatctttcctcgagcattttcgatatatgcagcagctgttttgagtcaagacccagttcgtaaaaagattggtgtttgtccgctttatttgacggtgtgtttgtagcctctccaataatggatgacagctcatctgttaatgttttatgactgtcttggtgctgaactgtatcagtgatagagtctgtaatgtcggctccgtatttctcctgcagatattccgtcaattcaccgattgtggagtaatcaaataataaagtcgggtacaactttgaacctaacatcagttctaattttttggataagtctaataattgtttagaatccaagcccatctcgtaaaaggaaatatcattcttcactgtttcagcaggtttttcaatcatgccggctatctcttggatcaaattatttctgatcatttctttattgttcgttgcgctgccgacctctttagctttttgggaatgctccagcctttgtattgaattttcatttctgactcttttcacaccgaatcgctcataataaaaagcaagctctccatcaggcctgtatacttctatgtccgcatataaaatgtctttagaaggcggctgcgttatactggttttattaatatacacaaaacaagacccagttgttttatgcagtgccctgaatgtctcaatatatatagggataaacgcatttgttccttcatccggcaagtctgatgtaaggattcccaacaagctgagagacccatccaaaaatgcgggatgcatgtaaaagtcatctgtatattcttttgaaagtccgcttaaactgacctctcccagaatataattttcaccttcatataccgtaccttccaatttcataaaatctttatgaatcaggccgcccctgcgcaaattacgataggcggcttcagcatccgaaatccggacggcccctttctttaattcttcgattgaaattgtcttttcgtttatcgcattttttcttatgatttccgcctgcaagttgactgacgcttcaccttccgccttttcagcgacccatttcctgcttgttgtttcaataagccagccgttttcttgttccgtaaactggaaggtgacttttttatcaaaatggactgacgtcgcaacaggttcacggaataaaacatgtttgatttcaaaacttcggggtgatatccctttctcagctaaaaatcgtgttattaaatccagatacgttacgccgggtatcgtacgcacttgatgaaggacatggtctgaaacaatataatcgtcatgtttgactaatacgctgaacctcatgcaactcgacaacctttcttcttttacaaagtaaagaaacagagcaggtgctactctgtttcatcaataatttcaagaagccgttttttattctgtttgatttgttttttccgatttgaatccggccagtactcttttctgacaaactcggcaggcggcagcggagttctgacggaatgatatgaatcatccaggccgcttaccaaaaggtgggcgtttgttccgccaaaaccgaaagcgctgatgcccgccctccgttttccatccttccagcttctcagctctgtattcggataaaaaggcgacttttcaaattcaaagcggggatttggcgtttcacaattcaatgtaggcggaatttccttatgccatattgataaaatcactttaatgaaacttgccgctccggcagcgcttaataagtgtccgatattggtttttacacttcctactccgcaaaattgcgttttgtttgtgtctcttcggaatacttttgtcagagcctgaagctcaatcggatctccaatcatcgtgcctgtgccgtgagtttcgacgtagctgactgatccgggagtgatatcggctttttcaaatgcatcttgaataacctgctcttgaagcttaggattcggggtcgtaattcccattgtcgcaccgtcgttattaatagctgatgcttcaatgataccgtatatccgatctccgtcagctttcgctttctccagcggttttaacagaacagcgccaaaaccctctccgggtacaaaaccgtttgccctttcatcaaaagtaaaacactgaccgtccggcgaaagagctcctccttctgttaacatcaggtaaggaatttcatccaaaagcagatccgcccctcctgccagcgccatctctgaatcaccgttttttatgctttggcaggctaaatgaatgctgactaatgaagaagaacaagcggtatcagaaaccatgcttggaccgtgaaaattaaagaaatgcgacacatgtgaagcaataaagttttgactaagcccgacgatgtggctgctgctttctttcggcagtttgtgaccgtagccgcccattctggaaccgacaaatacgccgactttttttcccgataattccgtttcttcataaccggcatcccgtacagtctgtacactcgtttctaagaaatgtcttatcagcgggtccgtttggatggctttctcctcttccatgcggaaatactccggatcgaagctgccgattccattgataaatcctccccatttgctgatgctttttcccttttgctgcaccggagagtaattttcttctatattccaccgggaatcaggtacttctttaatatgattcttcccttttctcagattgtcccaaaattcctctttatcagccgctccagggaacttacatccgattccgataacagctatctttgcagaggaagccgtctgcggttctgtatttcggctcgtcacagactgcatatcttgctgattgctgctttgagaatcagtctgttcgacttgttttttcaacggcggcgccgtcttaccgatatattccgcaagaccatgaatcgtgttgtgttcaagaagcacagtagggtcaatttttttctgaatcattgcttctattcgatgtataatgctcacaagtagtatagaatccacaccgtattcctgaaaatccgtatttgggttaagcttttcaaggggaatgctcaattcctcggcaaatacggcagaaagttcactgacaagcccttctgaatgatcaaaagtgtcgggagtctcctgtcttcggactggaaccgaagctccgccggttttattgatgttcaggagactgtctgcatgaaacactgttccttttttcacgataggaatgatattggccgattttctctccagtgcatgatacaaaatcgccagtccttcccgtgtggatagagagtccagtcccaattcatcatataaaggactcgtcacagtacccattccgacttctttccagctcggccaattgatggacgtgaaatacgttctccccttttgaaaatgataagccgcgaaatagtccatatatgcgtttgcagacgcgtaatcagtcattcctttcgacagtttgggtgactgtgctgcaattgatgaaaatagaataaagaaatccagcggcctattattaaaaatccgctccaaattctgaagtccagtgactttcggcccgtacaccgtcttaaattcactcattcttttatgaataaaggccggatttccgccgctgtgcagtccggcacagtgtatgacaccgcttatatctttaaattcaaggcttacttggtgaaagaatgaacgcagcttctcttcatttgtgagagaaccgctgtaatacatatagttgacacctttctcttcaaaactttgaaacagttttatattgctgactgtcttttcgtcctgtctgccctctttcagcaaatgatcccattcacttcgcaaaggtaatggacgcgtacccgtcagcacgagttttttcactccccgtttcaccaaatcttcagctattgctctgccaatgccccctgtcccgccggtaatcacgacggctttatccgcaggaaatgaaacaggcccgccggtatggattctttcttcttcaaaatacggaacatatctgacgccgctgcggtagcatacttcattctctccggtacattgcctttcattcttaaagatttgtttcagctcatgcgtttctttcatgctgtctatatctattgttttcacatgaacaaagccgtattccgcagaaagggctttcagaaaagccgctgattctgcccccgtcagctttggtttttccgctttaaatacctgcaagccattggtgatttgtaaaatggataatggtgtttcctttttactccgcttaattatttcttgtataaataagaatttacaatatgggatgccgttctgattgtcactctggtttccgatatctgagaaatcaaatatattttcgaccagccgctcaccgcccgagaagatctcacggataacgtcgtatgcgtggttttcatctaataaagaacactcaaacatttgatcagagtgttttataaatgaagagtgatgtttgatgacaatcagattctcctgatctatatccgaacaaatggagcgggcaattgattctgtgtcttgatttacaaatgctactgtcagtccgtactcttttgtttcggatggatttacaaacggattctccctccattttttttgcaagtgatgttgaaaagaatgctgagggatctctgtcttctcagtcctggacggaacccaataacgttcttttgcaaacggataagtcggaattgagatccgtttacccggctgctgtaaatgttgatgaacggatttccagtcgatatccgccccccaaacccataattgagccagcttttccgcttcaccgttctcaataatggtctttacaaacaattcacctgctctgccttccgttaacgccttcattttttcagcaaatgcatctgctgattgctgatgaacatatacgcctggaacttgcttgtcaccgcggcaaaactcaaataatttatctttcatttctttaagagaggtaccgataatcgccgctctggcctccatcgcttctctgcccgattgtgtagtgtatgccagatcccgtaaaacgacgctttccgattggctgccttccatcacttcattcgggaacaggtttcttatcgctccggcatattccttcaataagtattcagtaaccgcttgaatggaggggcaatcagttaattcatacatcgtgagttcaatatgaaacatttcgttaataaaatccgccatccggcttaattccaaaggtcctacgccaaattcactcaggtgatcagcaatattaatttcttccggatggatatgaagcaattccgaaacaaacggtttgagtacttcatacaccttttctttcatatcaggctgcttatcctttacttcaggacttagtgaacgctggataaaatctctcatgttttcggcatactcaagaagacgttcattgtctttggcagataacaggacaatatgcggttcgttctcaacatgttctgttgagacgtttgtttcttcatattcttctataatgatatgaacattcgttcctcccgctccgaatgagctgatccccgctcttctcggaacagttactgtttttccgttttcctgcagtttcggtttcttccaatcttgcaatgaccgctgtacataaaagggagaggctttaaaatcaatatttggattcaacgtctccgcatgtatggaaggaaacagttttttcagtttcatttgcaaaagaacctttgtcaaaccggcaattcccgctgcggcctcaagatggccgatatttgatttgacagaaccgatggaacaatattgagtgtgctccgtaaattcccgaaacgcttttgttaacccggtgatctcaatcgggtctccaagagaagttcccgttccgtgagcttcaatataactaattgtacgaggatcaatacaagctttctgaagcgcgtcctgtatcagttcagactgaccatttggattaggaaccgtaaaaccgtttgttctccctccgtgattgaccgctgtcgctttaatcagcgcataaatatgatctccgtcccttaccgcttccgccgccggctttaaaagtacggatcccactccttctcccggtacataaccgtcaccgccctcgccgaatgtccggcatcggccatcacttgcaaagaagcggctttgatttaataatgtatatttattgggatgaagcgtaagattgaccccgcccgcaacagcaagtgtgctttctcctcttcgtatactttcacaggctaagtgaatggcgttaagagaggatgaacacattgtatcaaccgccatactcggccccttaaagttaaagaaatacgatattctgtttgctattgcagaaaatggagacccgacggccagttcatttcctttaagtgattcttcaacgccgaaaaattgatagcttccatatgtgacgcctgcaaatactccgacctttttgcgggtcagatctgaaggtttataacccgcatcctctatggtattgtacactgtctctaaaaagagacgttcctgaggatcaagaaaagccgcttctttcggtgatatccggaaaaataaaggatcaaaccggtctggatttttcagaaaacctccccacttatagcagcttccctccagcatttctttccgatcatcaggaatttcgcttacgcaatcccgtccattcatcagcacattctggaactccctgatgttttccgcacccgggtatctgccgctgacaccgataatggctatatcagcagaaaggggatcggccgcaatgtgctcttttgaaccttctccttcagagcgtaccggcgcttttgtttccactggttttcttttttgctttttttgatatgagacaagttcagatgtgccggccggtttcagcagtttcatcattcgttcgctgtgatgactcaggaaatattcagctaactgagatattgaatgatattcaaaaaataatgttttcgacaatctgccgatactttgctccagctttttggtcagacgcatgatcattactgaatcaatgccgtatttctccaggtattgtttttcatctatgagtgagaccggtaatttcaattcctctgacattatatttttcagataactgatgatattttgtcttaattcatcgttttgcaaatcggcatctttctgctggtctgaatgtaagctgattgtgccggcacgcttcagcacatcctcaatcttttcttttcggcctttcagggcaatcagctgttcagatgattgacacaagctgttctccagagcctgtattccgtcactgtcatctaacgggtcaagaccgagttcctgtttcatgtaggatattccttcatcgtcaatattcatcccgccggaagtccatagcggccaattgactgacactatcctttcggcagactcttttgcggtcataactgctgcatactgatccaaacaggcattggcgaaagcatagtcacattggccggctgagccgaagactgccgatgtggatgaaaacaagacaagtaattcaactttcatttttttgatttcttccgccagccacagcgtgccataaactttcgaacctgtgacttgatcaatttcttcttttgtctttcttaagataaaagagtcacggagtacgccggcactgtgaaatactccatgtaaggtgccgaactgctcttttgcaaaagcaaacatccgttcagcatcactttgttttgaaacatcagatcggatatattcaactgttgaacctgaacttcttaaatattcgatctttttctcctgctcttcagttaaatcagagcgccctgtcaatatgagattcgctttccatttttccgacagatgttttgccagaatataaccgagaccgcccaggcctcctgtaatcagataattcccatgatgtttcagcggctgggttaaatcgaatgagccggctttattatagcttttcgtaaaacgtctgccgttttcatagcgcacttcaaaatggatatcccgtttttcgtcacactctctctgatatatatccgctattgctggaagagcggctcccgcaccctctgattgcgtgatattgataatctgatagtgaaaattggggtgttcctggtgaacagttttcaccaatccgccgagagcatgatgcagcggcagttgttctttattctctgtttgaaaaatatgcgtcagctttattatctttttccattttagttcaatcagcgcctgtgtaatatacagaagagaaaacaatccgttttccaattgtttctgtatacctttcttactcatgtcagcctgagaatcagaccacaagtgaagaatcttttcgggcagctgaaaatgatcatgaatgtatcggaacagctttagataatcgtcttttttcacgtggttcatacaaatcgtatcatcatgtaaaacagcaaattcttttccgcggataacaaacaagagagtacagtccttaaacaaaccgctcaattcttgtatttgccgttcattttctgcaaaaatcaggagcaatcccgtcaagggtacgctcttcttactgggaatgaacgattcagtccattccggcttgtaatataaaagcggatggttcgatgcccgtgatttttgattctgaatggatgtcacacgggcatagccttcgtcagccgacatttgtcctgtttgaatcagatcaagaatatcgctgagtagttcacgttttccgttcatcattcttcccccattaattgtttcaatacagccttctgatcaatatcattggtttccaattgacgcaggagacgaatgagttcgtcgtccgtctgaacagtgtctttttcatgaccatatctgaatctcacatctctgcactctgccagaatgcttccgtttttatctgtaaacgtcatatgacacgttacatcacggctgttctgccggttctctttttgagtatagacataaaaattttgagcgagagggtgatagacatccgccgctcccattccgatcaattccgggaaggtttctccgctgacaaaaaacgcactggcttgaatcgcggactcaagcgcttcaggagagatcgtaaaattctctctttttgcataaagctcatccggcaatgaatgaagcgacagcattccgtcactgtttttcgctgattcaatgacaaaaggcgcttcagcaggatgttcagtcatttttgatttgacttcagcaatatcaagcgcttcaggaaacataccgctttcaggcttaacaatatgcgcatttcccctggcaagacgtactttattttcattttttgtgtttgcatatatgtcaaaccgcgcaaagtcgcgctcaggcgtcagcgtaatcatcagttcccgtatatcagtcattccgttcatgctttcggtccacaataaatcagtcaatgtttgaaccggttgtccaaatgccgccgctgcattgacgatagccatttcagccaaagatgcataagggaaaaaggacatgtttccttcagacagacttagtgcgaacggatgattacggctgatttttttcgtgaaactgaactgattaaaatcggacgtgttactccccaagaaagggtgacccggcttactcacatccgctgaaacaagtgcttcccctttttccgctatccaataccgctgtttgatcagcggttgtcccggaatagaaatcctgcgggcattccgattcacctcaaaagtctcccaatctatctttcttccatttacccatttggatgctgcttcggcgtaatctgaacaaacgtgagacatttcattgtgaacttctgattcgaatgtattaccggtatagcttaagctgcttttttcacccctggtataagctgaaagctcttcagcaatgacccgcccggaatctgccactatcgccagccgttcttccatatgatcgcgtcccgtctgaagtgtataggcaatatcctgaagacgcagtttatgtttgttatccttcgattcattttctgatagaaaatcagccataacctttgcatattttatcagccgttgtttgtcttgagccgataaaacaaagatcactcggccgctttgatgatcaaaagcttttggcggctcatacgcttccaatataagatgcgcgtttgttcctcctgccccaaaagcgcttaccccggctctcaaaggatgaacagcattgctgttttgcggaatattccattcagccgctttccgctgcacttgaaaaggaacctgatcaaaatctataaacggattaacaatatcggaatgcagagaaggaacaagctgcttattcttcatttggagaagcactttcgttaccgcagcgattcctgccgcagattctaaatgtccgatatttgatttcaccgaaccgatggcgcaaggatggttcaattgataggaatctttcagtccttgaatttcaatcggatcgcctaatgacgtccctgttccatgcgcttcaatataattgacggtattcggatcaatgtcagctttacgaagtgcttctgaaatgacctccgcctgcgcatccggattcggtatggaatacccgctcgtctttcctccatggttaacggcgcttcccttaatcacaccgtatatttgatcttgatcttctattgcttttttcaatggttttaacaatacggccccgactccctcaccgggaacataaccgcttccgtcttttccaaaactccggcatctgccgtcacttgatagaaactgtcccatactgaggaacttatatttattcggatgtattgacaaattcactccgccggctaatgccatatcgctctctccacaatgtatgctttggcatgcgtaatgaatagaggtcagtgatgaagagcacattgtatccagagccaaactcggaccttttaaatgaaaataataagacacccgattggcaattgaagaatagacggacgccggcgagaaagccactccattttcttctccttcaaatagttgatattggccccacattgcaccgacaaatacaccgactttcatcttttccagcatgtttctcgggtaccctgagtcttcaaaacaatgtttggccgtttctaaaaagagcctttcctggggatccataagttctgcttcccttggggaaatatgaaagaaaagcggatcaaattgatcggctccgctgataaaacctccccacttgctgtaagacttccctttcatatctctgtcttcgctgaagaaatcatccatattccagcggtcaggcgggatttctgtaatacaatcttttccgctctttaaattctcccaaaattcaggtaggttttcagccatcggatactttccgcttaatccgataatggcaatgtcctcatgccttgtatcagctgtttcatttatttggatctcacggctttcatcctctatgaaggtatcttgaagtgcagattccaatttttctttgtcaccttcaaacacgatcagctgtgatgcgttcagagagagtgaatcttgaaaagctttgatcccattggttttactaaggggaaccataccgattttttgtttcatccatttttcagtttgtttatccactttcatgccgccgtcttcccatagcggccagctgatggctactgagacgccggagcgttcttttttccgcctcattccttcacgccactcagcgaaaagatcgatgaaccggttggccaatgcgtaatccgtctgtccgatattcccgtacatcgaggtgcttgatgaaaacatcacaaagaagtccaaaggttcggtttgcagcaagctgtccaataagaccgtcccatttattttcggagcgattacttcctgaatttcatcttttgatttttgaatcaataaagcgtcgtgcgtcacaccggcactgtgtatcacaccgttgatttctccgaatttccttttaatggtttttatgattcgctctgcatcgcggctatctgaaaaatcacctcttatatattgaaccgaagaaccgcctgctttcattcggctgattttgttctttttgtcttccgtaagttcagaacggcccgctaaaataatattggctttcgtttgggctgcaatatgttctgcaaatataaggcctaagccgccggcccctcctgtaatcatgtatactccgttttctttaaaggagaaatctgagtttggagccggttctgcttcccgtaaggcacggacccagcgcacatttccttcataataaagatcggtttctcccggatgcgcttccgtagattcgactctgatgatttcagctgtaagttccggcaacgatgacttgtctgatactgatatcccgattgtcttaagggccagtttcgggttctcaagcacaatagactgccctgcgccatggactgaagcgtaaagcggctgatcatttttatgatccgccggataaaggaaaagcgatacaacctttttttccgtcttgctgcgcatcaatgcccggctgaaaaataatagcgggtaagcccctttagaaagctgttcacttattttttccgggccggcaaatgatccttccggccacccgtacaccacggtgtcgggcatttgccccctttttttcagatcagctgcaagcctgtcaaagtgagcttcctccctgtgatctatctcataaacaccgtctccgtgataggagaaacgattccctgataaaacgagaatgatctgtgtattttcgaacccattttcagcattttcccgcataaaatgaaaaagctctctgtcatattgaaacagcaggcatgttcttttctttttattgctgcaatgcgggtcccaagcggcaggcttttgtctccaatacggcgttaaatatgtcagagccgtatgattctctccatgatgaagagggaggtctttgtcaacgaaagtcttttcgccgctctctgcaaaataatttgcaagtttttgaatcgtcggatactcaaacaataaagtagggtacagttccctgcctgttttctcctccaatgcttttacggcttgcataagtgttacggaatcgaggccttgttcataaaaaccttttacaacagagagtgtttcaggggcagtccctttgatgtctgcgatcagctgctgaatgtctccttctgttataagagcggaaagattttcgttcttactttctttcatgtcaggcttttcagccggttgattttgcgttaagaaataactggacattttttgattttctttaatatacgcggcgagttcccggatcgttttctgctcaaacaggagtgtaggatacagctgttcccctgttttgttttcaagttctttgacaatggcaagcaaagaagctgaatccaggccttgttcataaaaaccaatgtctgtccttatgtcacgcagatctatatttgaaaccccggatattaattctttaaggtgtgtctcgatgctttcgcttcgatttatgattgaatcttttctgatcaggctgtcttttggctgagaagccgcttcagtttccaaacgagtctgcttcaggttttcaattaaatcttttgagcgaatatgtttcacagacagccgcgtaaaataagcgatcatctccccgtatgcatcgtacaaaccgtaacttacttggatgacatcccctgaatcatgattttggtcttgcttctctatgtacacataacacctgtcttccaggcgcttcgtcatacggaaagattcaatatgaatgggaatatacgttttcatccggcttgccggagatccttgtgtaaaatattcgggacatgcctgataaaggatcgatatgatggtagacgcatcaagaaaagtgggatgcaattgaaaatagccggtatattgattggcaatttggctgagcgttaactctgcaagtacagaatgatcagacgcataaaccttccccagactcttcataaattcaaaatgctctatatcaaccttttttaaatagtcataacatatctccatatcatcttcacgggcggaggcatgtttaatttcatcaatattgattgaactcatgctttccgggaatttctgcatgagcctgcaggtcatattctcatcccagctttcatccagaatgcggtcatcttttacctttctgctcttcgcctgaatttcccatccctgttccaatccctgaaaacggatgcggatttctctgtcaaaggtatccgatgttgctacaggttccaaatacaaaatattctgacactcgagttcttcaataggcaaacctttgctcagcgccatacggtatatcatatctaaaaatgtgacaccgggtataatccgggtgccatgcacccggtgatccctgacaatatagtccgtatgtttaattgttaatgtgaactgatagttttgattactggccacctgtctcattccttttcttttctttataattctttgaaatcaagtaaaggaatcagcaattctgactcttccttttctggagtttctccattgtcgatccagcattgttccttattgaatataaccggagaaagcgggtgtctttttgtctctccatatcctaatgtgagatggctgtcgctcaatatcatatgtgcgttcgtgcccccgaatccaaaagaactgattccggctctcaaaaccccttttctgggacgccattcttttaaagacgtgttcggaaagaatggcgactgatcaaatttaaaacgcggatttggcgttttacaatgtaatgtcggcgggagcatctgattttttatggataaggcaacctttataatactcgctatccccgctgcgctcattaaatgtccgaaattcgtttttacgctgcctactccgcaaaattgcctttcttccgtaacctcccggaacacttctgtcagcgcttttaattcaatcggatctcctatcatcgtaccggtgccatgcgtctcgacataactgagagtatctgcatcaattccgccttttttcagggctttttttatcactgcgctttgcgctttcggattaggtgttgtcattcccattgtctgtccgtcattattaaccgcggatgagtcaattaccgcgtaaattctgtcaccttcggcaagggcgtcatcaagtcttttcaaaaggactgcgccgcatccctctcccggtacaaatccatctgccttctcatcaaatgtatgacattttccttcaggtgaaagcgcccgagcctcactcagcatgacgtaaggcttttgatccagcaaaatgtcaactccgcccgcaatcgccatatctgactcttttgacatcaggctttgacaagcgagatggacgctgaccaatgaagaagaacaagccgtgtctacaaccagattcggtcctttcagattaaaaaagtgtgagatatgcgcgcctatgaaattttgtcctatacccacgatcgtattttttgaaggggaacctattttggacataaacgtcccggtccgcgaaccgatgaagacgccgacttctttgtttgatacttcttcttttgtatagccgccgtctctcaaagtctggacgctgacctcaaggcattttttgattaacggatcaagctctgatgcctcacttttgttcatattaaaaaacgcgggatcgaaagactcaatatcttgaagaaatccgccccacttactgatactttttcccttttcataggtgtcagagtagtatgaagaaatatcccatcgcgacgccgggacttcgcggacactattttgtcctttcttcaagtttgtccagaacgtttctgtgtccggagcatccggaaactcacagcccattccgataatagcgatttggttcagactggtttgttgtatttgagatccgctgtcccgtacttcggaagcattttgatttatatgttgctcttttttccgaacctcaatgttttctgaatcaatttgaggactgattccctcacttgcaaataattcgtttaaatagacgcccagttgtgaaaaactcggatactccagaaaagctgatggttcaatttttatttgaaatgcatcttccgcttttttgacaagctgaaccagtaagattgaatcaactccgtaatccgcaaaagacgtatcctgatctaaattctcataaggtattttcagctccgcggaaaaaatctccattaacttcctgatcatagcttcattgtctccctgaccagagatctctttttcttcagcatccgggttatttttagcagcttgaattcttgtctgaagcagctgctccagcttgaatttctccggatgtgtctttgccggtataaggcaggggtatccgtttatcgtcatcatttcatccagcatggcaatacctgtttctgttgagtgtgaaagtaaaccaagtgcctgatatgatggactggtcacctcgcccatcccaatgtccttccagctcggccagttaattgattgataatacgttctgccggctgcatgctgatacgccgcaaagtaatccataaaagcgttcgctgcggcatagtcacttgttccggcgcctaataaaggaaaggcgctcgcaacagatgaaaacaaaatgaagaaatcaagtttgtcatcaataaaaatgtcatgaagtacctgcatcccctgcacctttggctcaaatacttctcttatttcttgatcagatttatgaataaaagccggattcgaatgattggctgcaccagcgcaatgaatcaccccgccgattttgccgaacttcagtctcacctttgaaaagaagcgttgtaatgtttctttttccgtgagcggcccggaatacacttccacctgaactcccttttgatccaactcatgcagcagttgtaatttcgaataaagaggtgacttttcatcggtgtcttttaacatgccggctattttatcagattccggaaggtcggttactcccatcaacacaagttttttgactcccttgccggcataatgtctggcaagttctgctccgatccctcttgttccccctgtaataaccagggtttgatccgtacggcatactggcagaccggatagtttccggtttatttccgttgcatgtaatttctcgacgtatggaatataacgttcaccgttccggtagcagatttcactatacagcccgtcagcgcaagcttcatctgtgattacctgtctcaattccgccgcagtcccgacatgcccgtctacatctattgtttttgattttatcttttgatactccgcactcagcattttatatagtccggctgtttcggctccggctaacgacggcttgtcattcagaaatgtctgcagccctctggtcacatgtaaaacgaaaagctgtttacgtgtctttatgatttcctgcagcagtgtcagcttcccgattgtgccggtgcgtaccccgttttgatcactccgcaaatctgacaggtcaatcatgccgatgatttccggattttcttctatgactgctagggccgtttttttggcttctccatccgaatgatcccagttatctgcgcaaatgacagcggattcaatcagaggatctgaatcaaacaattcgaatgcaagccgctcactttcactattagccaggatcatcacctgtcctttcgtaaaagcggaaggcgcagccttttgttttttccacgctttttttaatacatcaaatgataagtcagtcggtgcatggggcaaactttgcggtacacctgtttttttctgtttctgtgctgcttttgcggcaggcacccaatatctgttccgttcaaaaggatatgcgggaagagagataagcttcggtaattccgcagtgtacatctcttcccattgaacgtctcctccgttcacccagtgaatggccatttctcttgcacttttaaagcgggcggctgacagggcatccttttgaccagcgtctcggcgggcctttcccctatataaaccgtttaacttatgatctgaccgcaaatacatcgtcagcttattgcgaaggtcgtcaatgctgctagcctcaacagcgagccgctcttccatagcgtttctcccggtctgcgaggtgtacgcggcatcggctagtgacgtttttggctccagtccttttatatatgcatcaatcaagagtctgagccgttcttcatttttggcagaaagcagaataatttgcgtcttgttgctctgtaccgtttccatcttttcttcattcttatactcttcgatgataatgtgggcattagatcctccagcgccgaacgaactgatgcctgaccttctggcttgattttgcggcgtctcccaatcggtcagttcagactgcacgtaaaacggtgtttcctcaaaatcaatattaggatttaagttatcggaatgaagggaaggagcaagctgtttatacttcatttgcatcagcacttttgtgatagaagcaattcccgccgcagcttctaggtgtccgatatttgacttaaccgaaccaattgcacaactataatcgcttttcgagctgtgcaaagctttggttaaacctgaaatttcaatcgggtctcccaaagatgtcccggtgccatgcgcttcaatataacttatgctgtctgcatcaatccccgccttatcaagagtttcactgatgacgtttgcctgctcgcccggatttggcacagtgtatccgtttgtttttccgccgtgatttacagatgttcccttaatcacaccgtaaatcctgtccccgtcagccttcgcggcagaaagcgatttcaaaagaacggccccgactccttctcccggcacatatccgtctcctcccgctccaaagcttctgcagcgcccatcgcttgaaacaaaatgattttgggaaagtaaagtatatttatccgggtgtaaagataaattcacgcctccggctatggcgagggtggattctcccctttttaaactttcacatgcaaaatgaacagcagaaagtgaagaagaacacattgtatcaattgcaaggctgggtccgtgcaggtcaaagaaatatgacacccggtttgcgatagacgaataagaagacaagagcgcctgacgttcctcatcatctgaagcaccggctgcaaataactgatagtggctgtaggtgacaccgacaaatacacctgtcttatgccgtttcaactttttctttgtgtaacccgcatcttcaaacgtgtgccatgctgtctctaaaaataaccgttcctgaggatcaattaactcggcatcacgaggcgaaattgagaagaacagcggatcgaatttatcagcgtcttttataaaacctccccatttgctgtcatgacgggcattgtcacctgtgtgataatatttccgaaaatcccagcgctctttcggtatttccgttatacaatcttttccggaagaaatattttcccaaaactcttccacatccttcgccatcgggtagcggccggctataccgataatcgcaatatcttcctcggaaggtgcggatggtatgcgggaaacggaaagcttctcccgtttcgccggagccgaatgatcaattcgctgttcggctgccggtaaaaacgccttctgcaactcatgctgatagtgttcaagaaaatactctgacagctcttcaacactgctgtattcaaagaaaagagtcttagacactcttccaaaatatttttccagacgagagttaagacctaaaatcgttagagaatcaattccgtaacggtcaaacgtatcctcgggtaaaatactgtccgccggtcttcccgtttccgctccgacgatctctgtcaaaagacggaccgtttgctttttcagatctttttcatgtaattgcggcaggttactgttgttttcaggcacagtctctatctttttatggtcagttgagagtaattcacttattctatctttgtctccgctgataacagccagctgagaagcagagcggctcatactgtcctgaaaagcggcaagccctgcttgggcggataaaagttccagccctgcatgtcttaaagcctgcagctctcccggcccgactgtcatattgcccgcatcccataacggccaattaatagaaagtgttttcccgggacgtcctttaatgcttcgatactgggtgaatccgtccatacatccgttagcgaaggcgtagtcgctttgacccgcattaggcagaacggccgaaagggatgaaaacataacgaagaaatctagaggctcttcttcagctgctttatccagccaaacggttccgaatactttaggcgctataacttcttctatgctttctttcgttttttttatgataaatgcatccttaacaagtccggcactgtgcaaaattccgtttaattctccgaatgtctgcttaatgtgcttaatcaaagcgtccgtctctttttcctttgaaatatctgccgggacatataaggcttcagcgccgagattttcaagagcgcttaatttttgcgccgtttcacgggaggccggggaacgcccggttaatatcagcttgacttctgcctgtttcgccagatattccgcaaacagatacccgagaccgccggctcctcccgtaattaaatacacaccgttcttttttacactgaaactatgtttctccccaacttctttttttactctttgaagctgccttttataataatgcctcggctcataacaggtaaagcggtccgtcttacattgattgttccattcaaaagagatgacatctgcaatatgctgctttgtaaacggctcgtcaaacattgatttcagctctgcagccttacatgtgaaattcggattttcggcctgtacggtcttaagaaaactttcaaccgcgttataaatcggctgaacctcgccctcggcattttcatacagatacaaaatttctgctttcggacaaagtttgttcgccatgaaggcctgaaacatttgaaacaaggaatacagacttttattgagctgctttctcattgcatcttccgtatttttgaagagcccggcagctaaaaaatgaataatatggcggggtcttatattttgagaacgcagaaccccgcataacgcatcataatcctcatcttttgcaaagttcattgtaaaacgaccgttccggcaatcttcgaaacgctcgccggaagtcacgtaaatgaaaggcgcctcataaccttcaagctgtctcttcattacggtatacatgctgtcgtcttcgcaaaaaaataaaattggctctttcgtatgcgggaattttttactgcctttaaattcatatctatcccataccatttcatatagatgggttttccccaagctcttaattaattccagcccttcttcaggcgtcaggttgcattctttcacctttttcacgatttgctcaatttgcatcgttttttcattcatggaaaagcaactcctctatcagctctgacgtctctttcgtattcatctcacctgtttgtgctttttcaagaagcgacatgatttctccatctgctgtatctttatttgagttgtgaagctcagtgttcgataaagcctcagccttctgcgcttcatctttatttaaatgaatccaatgtctgttcttgctgaaaggataaagaggaagagacagtttaaccggtttgagttcctcctcatacaagtcttcccagctgatttcacaaccgatcgtccacaactgagccagtttggccggcttgttttgctgaatcagtgattgaacatatgcatgaccttcggggccgccgaataaaggagcgtacagactatcaaaatccgttacatttccttcataaacaccttgcagcctgctcccctggatgtaaccgtttaatttttcaagaagatctccggtattcgagcaagtgatcgcaaggcggcattcaaatggttcccttccggtttgcagcgtatatgctatttcttcaagaccgattccggacttttctctaaaattgccgttatgcggtttatcagctgatcgattccggatgctgctgatatagcggcacagctcgctcagtgtctttaattcctgaaatatgtcaagtgatatttctgtgccgtacatttggtttataaaagagattaattcggaataagccaacggatcaaatccgaattccgaaagaggtgtctttgcatctatatctgcgatatctaaacgcaggatacccgctgccgcttcccgaaccgcctcttgcaaatcacgttcctgtacctcttgctgactgaattgaactgatagttcttcatgtaaaaacattgttaactctttggctttaaccatcagcctttcctttgttttggccgaaagaacaatgatttgttcccgctcggcagttactgctttatcttgtccgtattcaaattcttccacgatgacatgagcatttgccccgccgaatccaaaggaactgactccggcacggcgcggaatttcatttccttttcgatctattaatctggcccacttcatagttttattgacaatatgaaacggtgttccgcttaattgaatgtaagggttcagttcattgacatgtagtgtggcaggcaatgttttatacttcatggatagtaatactttaatcagccccggcattccagaggcgggctctaaatgaccgatattcgtttttactgaaccgatgccgcaatattgatcatgattctttcctgaatgcggctcaaaagatccaaacgcttttttcaagccttcaatctcaatcggatctcccagttctgtcccggttccgtgtgcttcaatgtaagatatcgtatcaacaggaatatcggcatttttgtaaacagacgttaacagttctgcctgagcttccgggttcggagcggtcaatgaagcagatcttcctccgtgatttgctccggttcctctcagaactccgtaaatattgtctctgtcattcattgccgcttgcaatggtttcaataacagaacagctgcaccttcaccgcggacataaccgtcggcaagtttatcaaacgtcttacaccggccgtccctagacaaaataccgagtttatcagtatacatatgcgtgactggatctaagagcagcgaaaccccgcctgctaccgccagctcactttcaccattttgaatcgagcgcacagctctgtggattgctacaagactgcttgagcaggctgtatcaatggactcactcggacctctgaaattaaaataatgggatacacgattgctgatgagcgcctggctgtttccggttcccgcaaacgcatgcgccccgtccgaatgcctcatcagcagctggcggtaatcattaaattgaatgcccgtaaacaccccgatatttttgccagacagctttgaagctttgtaacccgcatcttctatcgctttccaggtctcctgcaaataaattctgtgctgaggatccatgagttctgcttcccgcggattaatattgaaaaacgcctcatcgaatttatcggcatctgtgataaagccgccccatttcgaatgtacttcgctgcttcctttgccttcggcgtattttttccaatcccagcgatccgggggaatttcctgaatcaaatctttttcattgattaaattgatccaaaactcatctgcattttttgatcccggaaaaacacaactcatcccgataatggcaactggctgcttctctggatgatggtcagcctgtcttgttgtctttttttcaaacggaaaacttcgcggcggcttcacggttttcccggtggttttcccagcgtgcactactttccttttttcagaaatgtttttttctgcatctgtattcccttttgcaacagtacgcagttcactgtttagaaattctgaaagagacttaatatggctgtaagtaaagaaaacggcaggtgtcagcttaagcttgtattttttattcagtcggacagctaatgttttcaaactgatagaatcaaagccgagattgccgaaattctctgccgtatccagctgtccaatgttaattttcaataattccgataccatttgcttcagttcttccaggacattgtctgtataagccggtgctgtataagaaatttcctcttgacgaacctgaagcgtatttactttttgatgcggcagatcttttcttgctggtgtcgtttcggcatccccggtaacaaccgaaatttgcggacagtcacttgccaaaatcgtctcaaaagccgctatcccttcttccgtttccaaataatcaaacccggatgcggaaagatatgcttcttcagcttctttgtttaaatgcattccgcctttacgccacaacggccagttaatcgaaatgctcttgccttgtctctcttgccggcggctctgttcggatctccaatttatatattgatcttgaaaataattgcccaacgcatagttaacctgtccaaaatctccgaagaccgaagaaatagaagaaaatacgataaagaaatcaagcggctcatctttcgttaattcatctaaacataccgtgccttcaattttagcagtcatgccatctgaaaaatcagccagattcatctctgtaaataaccgatcatcggcatgaccagctgaatggataacgccttgaatagagccccaagtccgtttcgtttcttctatgacccgacccatcgtcttttgatctgcggcatcagcttgataatataccgcatctcctccaagcgcctgcagccggtcaatgttatggcgtttatcagctgttaacggtgaccttcccgtcaatactaattttgcttgatattgagaggctaaatattttgcgaaaatcaggcccagaccgcccaaaccgcccgttatgaggtaaatcccttcctgtttcagctgatgagagtgctctgtatgattgaatacatactcctttaatgtcttaacatacctcttgtcattaatatatttaacttcttcagcctgccgttccacgcctgaaaccatttcgttaagacaaaattcagccattttttcaattgatatacgttctgaaaaaccgattgacttcacattctctgcggatggcaccaacatatttgccgtttttaaacagcctgcaagagcgcccgtatacggatcattcacgccttctttaaaagagtgaacaagaagcagagaatgaagataaagagaggcgtcactgcgggcgctcagggcttttaataaataaaaaattgattccaggccgctgagaaggcggtcacccgcgtaaaatgtttctcccgtgtgcaagatgacatcaggagaaaacccctttttctctaattcttcgaataaacgaatgtaatctgacgtcacttccgggtttacatagaatgtcagcagattttgatcggtctgccgctgatccggcgtgacgagaatgacacggctgtctgattgatttttcagagctccagccagtgcttcatcttttgcaaagaccagaattgtttttggctccctatctttgatctcaatcagaggatttttttgatcccacttatgctcataaaaacgtacatttttattaggcttttcgccaaaaaccagcccgctcagttccatcaaaatcccgccggcattgtctaatacatacatatcataagccgaatcgctttctccagtttgttctgcatatacataaacgggttcagtctcatgatcaaaaatcgtacattctttaatgttttccgggagctctccggcattttcccccgcaaggtatatgacggcttgatatacgctctcaataacttccggtttgattatgcaccctttcggcccggcctttgcttttatttttaaaagtacctgtccgttcctgctgacgcagtgctctgccgctttcagactgtcactgcagctgtatccgaattcggcaagccgctgataaaacgcttcgtacggaatggggtctgcgcgctgagacagaaacggctcaagatgaatatttccgttctcgtacgccccgccttctaattcgagccgccctgaggaataaatggatgagtcgctctgtttttctatagaatacgatgcaccctgattatccggggttaatacaatccggatctgctcattgcttccgctttgtaacatcggttctctaaaggagagctctgttaatttaataatcggattccctgaagccatcgctccggcagctctcgccatttcaatctggctgagaaacggaaacatttccttgtcttgatactttgtttttatatacaaaccggtatcgcttacattgataagaaacttctgtgctttaaaatcagatatattgcatgaaatgtaaggatgcagatcgttattaacgttcatccggcggcttcccatattttgcgcatctattctgcacagctctttggcaaatggatatccgggtgctgatacccgtcttagagtggcatctttataaagtgacggccaatctaccccgttaccgccaacccagtattcagcaatcttcaaaagatctctgtttgcggctgcttcttcaatttcaactttattcatcctttgagcttctgttgtgtctttgccgcttgtaaaaatatgatccgtcgcgtttccgagagtatagtctgtcagtcctttaagcaattcatctcttgtggaggcgataacagccaatctgtgcggcatttcttctctgccggtttgtaaagtaaatgctgtatttctaagtgtttctaatggataatctctggctgctatatgttcttttgcgcgttttgcatattctgccagcctgtcggcattttttgcagaaaaaacaaataaaagctgttcaggttcttcagccgcgagaggagagatagcttcatccgcaaattcttctaaaataacatgggcattagctcctcctgccccgaaagaactgattccggcacgcctgggaacggatgactcccatttttcggcactgtccggtacataaaaaggtgttttttgaaacggtatattttcattcaattcagcagaatgagtcagtgacggaacaatcgttttatgtttcatttgaagaataactttcgtaatgcccgctatgcctgcagcagcctcaagatgtccgatatttgatttaatcgacccgatcgcgcatgttttcttatcgcgttcggcatctgaaaatgctctggtcagaccggtgatttcaatcggatctcctaaggcggtgcctgttccgtgagcttctatatagctgatgctttttggatcaataaatcctttttttaaggctctcgtaatgacctcactttgagctttgggattcggcacggtatatccattcgtcttagcaccgtggttgatggctgttgccttaataactgaataaatctgatcaccgtccgcaatagccttttttacaggtttcagcagcacggcacctgtcccttctcccggcacatagccgtctcctccggaaccgaagcttctgcaccggccatcactggataaaaatccgccttgagtcaggagttcatatttatgaggatgaatggataaattgacgcctcctgcaattgcaatttcacattcattcctgattaaactttcacaggcaaaatgaacagccgttaatgatgaggaacacatcgtgtccaaagcaatacttggtccgctgaaattaaagaagtacgatacccggttggcgattgatgcatatgaggaagaaacggccgcttcgtgaccaacgctgtacagctgatagtggccgtacataacccctgcaaaaacaccgacgttttttcgttcaagcgttttctttgcgtaccccgcatcttctatggtgtgccaaaccgtctctaaaaacagtctctcctgcggatcaattaattcagcttcggcaggagaaatattaaagaacaacggatcaaaatgatacacatcgtcaataaatcccccccatttgctttggttttttacttcatcgcccgctgcgggctgatagtgcagccccgaatcccaccgatcctcaggtatctcagttatacagtctttaccgttcaataagttttcccacagagtatcaagatcatttgccatcgggtaacgtccgctgataccgataatcgcgatatcattgtcatgatacttctcctgctgcacctgatttttcatctggattttctgtttcccgttaacttcggctgtctgttcatgatcttttttcttctgagatggggtgctgctcccgttttctcctaaccggagtttatgaagaagagtatccctgtgctcctcaacgaaatactgtgacaattcttctgcagtctgatattcgaataacagcgtttttgagagcgcgccgaaatgtttttcaagctcattcgtcatattgataatcataacggaatcaagtccgtatttttccaatgcctcttctgcatctattttgtccgcaggcatcctgaattctgcagcaatcactttgatgatgaaatcagatgtttcagctttcagtttctctgaatcaaatgattcgatatttctccctgttccttcatctgcctgaatattgtcttttcgttcatataattgctgaacatgattgtcaatttgctcatctccgtaaaatacagtaaattgcgaaaaaccggaggacaatgcgactgcaaacgcttctttaccttcctctttttctaaaggataaaaacccgcctttttcattgtctctaccgtgcgctcatccacttgcatgccgacttctttccacagcggccagttcagagagagagaaatcgtatcagaattccgggcagaacgcatattcatgaaatgatccatataactgtttccgaacgcgtaatcagattgcccgacatttcccaacactgcggaagtagaggagaagcaaatgaaaaagtcaggattttctttctcaacagcatcattcagccacatcgtacccaatactttcggtctgattacctgatcgaattcctctcgtgacttgttaagaaggaaagagtcacggatgattcccgcgccctgaatgaccccgtttacttttccataagaagttttggcttttttgactacatattcggcttcttccttattggtaatatcagcctgaacataaacagctgaagaaccggtatcctctaatcgtctcagctgttttcttatatgatctgaaagcggagatctccccgttaaaacaaggcagcattttgtttgaaaagccaaatattctgcaaaggtaaatcctaatccgcccgcgcctcctgcgataatatatactccattttctctcagcggcacatctccgcttccggaatttttttcgggttcatacattttgagctgtttaacataacgctgcatgtctttataacggatctctacatctgaaggctggaaatcactcagctcattgcgtatgatatcagctgcgtgaacagctgctattgactgctccatctcaatgctttttgctgagattaacggattttccagctgcaatgtccgcaaaaatccgcttgccgccgcgtaaagaggctgttctccagaaagatgtgaaaaatatccatataacagtttgatcggtttgcggcagttatttttgaagagcgcctgttgtaataaaaacaaagaatagactccgctgtcgcattgttcacgaatcgctctctctgtcttttcaaacggcatgtctgaccacaaatgcaccgcttcccgtatatctgacttctcttcttctataagccatcctaacaggtttatgtaatctctttcagagcgggggtcgatttcaaatacaccgtccccggtttttcgaaactctttccccggcttaaccaaaataacccttgtatcatgcaatgcagcaagttctttactcacatcttcatttttatcaaataataaaaggctgccctcacgccggccgccttttacatgaatgctgagatctgtccgctgccagaccgtctgataatatatcgcctgtccgttaccccctgcggaatgagaaccaagctgctgtatccgctttactccttcttccaaagaaatgatgccgctttctatgtcagaaagtactttttttctaatatgacgggcttctttcataaaaatcttcatcccctttacaaatggcactgccgcaaaatgataaactaatcctgcatacgctccagcgcataatctgcttcctccgcagtcagttcgcccgcttttaattgtctgaggagctcttttactctctcgttctttccattggaatccgctgttgcacgagtctgtgcctccgcggaaaacgtttcttttttacgaatggttacatccttcaaacctgcaagtctttctccttgttcattaagcagctgaatatcgtaaataagctcggattgacctttttggcctgttttacgcgcataaacccagcattctgctgaaacctttttccgaaccgtaacctctcctattgaaaaaggaacataaacagatgcctcttctcttccgtccgtaatgccgaacaaagattgcagagccccatcaattaaagacggatgcaatgtataatgttcaagagcatatgcggcttcttttggcagcaataagtgtgcaaccgcttccgtttttccgccccataaacgctgaatcggctgaaaagcgcgcccatacaggaacccgttttcccgaaaatactcgtaacattcatcttgttcacggacaaaagcacttctgtttatcatctcttgtctgtcgatgttctctatatcatcatcactgtaatgatgatcataatctaattcccccgtcacaaatccagtccttacagcagcatcctcgtcaggtgacatgttaaataatatactgccgtcttttacggaaatgtgagtgtaaatggtcaggctctctttcaaaagcatggccggtctggcaaatatcacgttttttaaacgagtgacctttttctttcgatatgaccgcgttcccgctgcgcatgccatttcaagaaaagcagctgccgggagaatgctcttgttttttacgatgtggtcttttaaccaaatctctttttctcttaatgtcgttttaaaaaactgctgttccagagtagattcattcgaatccagaagcgggtgcagtgaagactgccgcggcaatatttccggaaattctgcactttggtttcgaggcacccagtaagactcctcagcaaatggatataaaggaagcttgaccttttgcggggtatattcttcatataactctctccaatgaatatcagccccgaaagaccataattttgcaagaagattcaagtcctttgtctccatcatcacctcgaggaatttatctttcctcttttgatcatgaaagataaagactttatcaaaatctttcgtaacattccctttgtatacgccctctccaattgttccttcagtacagaaagttctcagcttctccttaagttccggcaaatcggaagctacaacagcaagtctgtcttccatcggttccctgcatgtctgcaatgtaaaagcgatatcagctgccgagacctttgtctcccgctctgtgaattgcagaaggcgccgggcgtattctttcagcctgtcttcatttttggcagagagaactgcggcaaacggaccgcttattgtttgtgtgtccgcatggttttgatattcttccacaatgacatgggcatttgctccgcccgctccgaacgaactgattgctgctctcctgcgggaggcgcctgattctttccgccactcttcttctttctgctgaacgtaaaaaggcgtcttttcaaatcggatattttggttcagctgttccgagtgaatggatggcgccaatttctgatgcttaaattgtaaaagaacttttgtaagggctgctatacctgcggcagactccagatgtccaatattagacttcactgaacctatggcacaaaattgtttatcgtccgtaaatttctcaaacgcttttgtcaatcctgcgatctcaatcggatctccgagcgaggtacccgttccgtgtgcttccaagtagctgacggaacgcggactgatgcccgatttcttgaaattttcagcaatcagctcagcttgtgcattcggattcggaaccgtaaatccattggtttttccgccatgatttacagatgttcctttaattactccgtatatatgatcctgatcagcaattgctttttccaaaggtttcaaaaggacggcgcccgaaccttctcccgggacatagccgtctccgccctctccgaaacttctgcacaatccttcggtggaaacaaaattaccttgactcagccaaaggtatttgctgggatgtatggacacattaacgccgcccgcaagcgcaatttcactttcccctcttttaatgctctcacatgccaagtgaatggccgtcagcgatgatgaacacatcgtatccagtgcaatgctcgggccggagagattaaaaaagtatgaaaccctgttcgcaatagatgaaaagaaggaactgagcgcaatcggattgccccgcgcagtttcttctgcgccgaataattgatattgtccgtacatggctccgacaaacacaccggctttcataccgttaagcttctcttttgtatatcctgaatcttcaaacgtatgccaggaggtttcgagaaaaattcgctcctgagggtccatcagctcagcttctttatgagaaatgtggaaaaacagcggatcgaattgatcaacaccgctgataaaaccgccccacttactgttgattttccccttctccattctgtcgggactgtaattcgctctgaaatcccaacgttcctcgggaatttcaataatacagtttttccctccggcaatgttttcccagaactcctcaagagtatcggaattcggatatcttccgctcacaccgataatggcaatatcctcacccggctgaaccatgctcggtgcagatgtatccttctgctgccggtgctgttttttactcagattttctcttttcttcggcactcttgttaccggagctgcccctgcggccttaagcactttttctttaaaagatgttaggaagaagtttgaaagctcttcaatgttctgatattcaaaaaagattgtttttggaagatccccgaaagtatcttcaagctttgaaataagtgacatgatcataagtgagttgattccgaatttctcaaaagagtccttcgcatttattttatgagcttggattttcaagacaccgctgatgatcttgattaaatagtcatttactttttctttcgcagcatgttcctcttcttcatcgtgttccgccgtgagtgtatcttgatctgctgcagctgtatttctttgaatcgaaagcgcttttatcattttatcccgctttccttctgcaggcattaagctggtaaatgaagaccgcagcattttcagaaacgcttccaaaacagaggaagttcgcatcggagtcattccgtatttttcttttatttggttgattccactgctgtcgagactcatcccgccatctttcaataacggccaattgattgatagggtttttccgtttcgggagagctgagatcgaagcactgcaaaactgtccataaaatgatttgcgtacgcatagtcactttggccggcatttccgtaagcggaaaaagaagaaaagagaacaaaaaaatcaagatcttcgtcttttgtcagctcatccagccagattgtcccgtaaactttcggtttcagtacgtccgtaaaatcactgagacttttatttacaagaaatgagtcacgaaggatgccggcagcatgaatgatcccgtttatgctgccgtaccgctgtttaacgccgaaaatgaatcgctctgcctctgttcgatctgtgatgtccgtccgctgatattcaacaatagagccgctctcattaagcttactgatccgttctttttgatcagctgttaaaaaagaacggcctgtaagtataatcacggcttggttttctttagcgatgtgttccgcaaacagcagcccgagttttcccgctcctccggtaatgatatatatgccgcctttttgatacgttacagatccgttggcgtgttccggaatatcaatatgctgcagccctttcacataacgggtatatgagtctattaaaatctcacattcatccgtttgaaagcgctgtatttcactgattgcagcatcccacatctcggaaaccggaggatttttgtcagaatcctcatggcgtatctgtatgcttttcgctttaagcttagagctttccatgtttaccgttttcatgaaccctccgacagcttcatgaaacggctgattcagaccgcttgtccaataaatatgcaataacgtaacaggttcgtttctccgcattaaagcttttgataataaaaagagcgagttgatccctctgcgaagagtttcattaacggatttttcagtgaattctctgatttctccgttccataaataaagcacgacatcaggtgtaaatccgttttcagccaaatcagacagcagcatttcgacatgattttcatcagaaggattgattgtgcatctattccgttcaattctataatcagaatcgggcgttacgagaatgacacggttatgatctccattcatcatctcggcatgctgaaaaagacggttatcctgatcaaaaatcagcatattccccggtgcctgctgattcggcatatcaatgttatttgttcttacccaatcgttcttaaaaaaaatggttggggacggagcttgtgattccggctccgcctttttttccatttgttcttttctgtaagtgcgaattagctccagtcctgcatcaggagacatttgctgttcttcaattaaggaaagtatttgtttgatctgcactattttccctccagcagctgataaacttgaccagcagaaagttcaccgtttttcaattgttctaataagaagagaatttcctgatcttcatttttacgtcctgcggttaattctcccccggtcacttttctgacagaaaagtctttcatgctcacggctatttcgccgctctcgttaataaaatcaatgttatacgtataaaaaccggtttctctcaccgagacatggcatcgggcagtaagcgtcctcttaatgtgaagctctctaagtgaatatggaacaaataagccgtctttctcattatctcttaacaaaaatgccgccgcttgaaaaccgccgtcaattaatgaaggatgaagtgtaaaatgtgaaaacccgttcgctaaatgagccggaagctccaattctgccattaactccatatcaccgcgatatacggctttcaacgtttgaaaaccgctatgatatgtcaggcccatacgactgaagcggtgataacactcttcccggtttatgaccgccttactgctgcgtttgaacttatcaatatcgacatactcagcattgctgtttatgtctccgaatactgtttcactttgtgtgcagatttgctgcacgccatccggcccctctttacatatcgttacgttcaacttatcttgtttcatttccaagtcggtataaatgtgcagcgtttttcctttatataatataggtctgttccacatcacgtcttttattttagatactttactttctccgcttatttccgcacaaacaagagccatttcaagcgaagcggctcctggcagcacatagtctcctgaaacaagatgatcagtgacgaaaaattcagttccggaaataacagttttaaatgcttgtttctttaatgttgagacattctcgctgattaatgggtgaagacttttgctattaacctcgcttttgttctttttcggggtgaaccaataactctcttttgcaaacggataagttggcagcggcactctattcaatttcttattgccgattgtcttccattcaaactcggctccattggcccaccattgtgcgagcagctcctcttttccgctttgaagagcctcctcaatcatatattcagaaacagctgtgggctcttcagtgttttcgcttataaatacgcctttttgcaccttgctgtcatcaagaaagctgacgtatttatctctcagctcagtcagactcgctgcacatacggcaattctttcgttcattgcttcccggccgttttgcaatgtaaattccatgtcactggcattaacggtcatgtcaccggcaatcacgcgatccaagtactgaagcataagccggatatactcaagtaattgatctttggttttcgcagataaaacaaaaatatgtgtgttaccgttgttttccggcatttctttttgaggttccctatattcctctaaaacaatatgcgcgttcacaccgccgaatccgaatgagctgacacccgctctcctcggcagatcgttgttctctttatcttttatcggattccacttttgagcggtttctgtgatataaaatggcgtattttccagtttgatgtatggattgagttctgaaaaatgggcgagtcccggaagtttgcgatatttaaaagccagtaacactttcatcactccggctattccggcagcggtttcgagatggccgatgtttgttttcacagacccgattccgcagcatttctgtttcgcaaaaggaatgtcccattcttgatataacgttttaaatgcctttatgatgctgtttacttcaatcggatcgccaagacttgtccctgtgccatgcgcttctatatatcccgcagtggcagggctgactcccgccttccgccaagcttcggttaataagtccgcctgtgcgttcggattcggagctgtcaaagaattggcgcggccgccgtgatttacagctgaccctttaatcaaaccatatatatgatcaccgtctgcctgtgctttgctgagcggcttaagcaatactgcagccgccccttcactccttacatagccgtcagcgcttttatcgaacgttttgcactttccgtctttggaaagcatacctgctttatcaaaagctataaacagagtagggcttgtcataatatgcactccgcctgcaatcgccatttcaaaatcgcctctttgaatcccctcagccgcacgatggagtgcaactaacgaacttgaacaggcagtgtcaatcggttcgctcggacccgtcaggttcagctggtaagaaatacgatttgccaatatacaatgatttaaaccggttgcggtctgcgcctgaacagagacaccattttcattcagacgttcagcataatccgttgtggcgacccctgcaaacaccgcggttttcgtccctgccaaatcagacggcttatagcccgcatcttctattgttttccatacagtctccataaaaattctttgctggggatccattaattctgcttcggcgggagaaatcccgaaaaacaacggatcaaaactgtccgcgcctttgataaatccgcctttttttatttttgttctattgacgtccctgatcggatcgccgtcaaactctttccagttccaacggtcttcaggaatgtctgtaatcatatcccgccctttttcaattccttcccaaaagtcttccagcgtatctgtttgggggaaacggccgcttattcccactattgcaaccggctcattcatatgtctttcctcttgcctggttttgttttcaggctcaggggaatgttcataagattccggcggaggcgtgctgtacaatgttttttcgtcagctgcagaaaaagattctgtctcagcaaaaaggatttctccgtattgctcgattacataatcagtcatttcagccagtgaattgcattcaaagaaaatggacggcaataattccgtaccatattgttgattgatttcatttccgagtctggtaaacgtaatagaatcaaatccgtactcgccgaatgaagtctcttcttctatttcctttctgtcaatcttcaaaatacttgacatcatctttgcgatgccctcaatcagattttctctccggtctttcgccgcagattcatctgaagaaaaagaaccgcagagatgaagctcctcggaatactcactctttaaaaactcaagaagttcattaaaatcagtaagaccgaaaaaatctgacggcatcattgatattcctaaagtttcgtttaattcgttgcccagcattgtaaacataattgaatcaaatccgtattcacttatcggcagttcaaaatcaaattcccgttcttcaatttttaatacgccggtgatgatgcgtgtcaaagtgctttttaaagattcagttattgacagctctttcggttcgtgattttcgtcggcgattgccggatcactttttccgctgtcaatcgttatcattcgttccagctttaattcattaccgctaaataccattatttgatgttcacaccctgtcattgcttgatcaaatgctgcaaggccttcccgttttaccagaggcagcattccgaaacggtcataaaggaacttctctgaatgaatatcaatttgcataccgccttctttccataaaggccaattaatcgagactgtttttccaggtttattttccgccgctctcatttccgcaaaataatccataaaccggtttgcataagcataatcagtttgtccggcattcccgattattgcgctgatagatgaaaacataacaaaaaagtccagaggttctctgtctgtataccggtcaagccatattgttccgtaaaccttgctggccaaaactgaatcgagatcctcttcacgcttattgatgagtaatgaatcttttatcacaccggcgctgtgaataattcctttaacaggacctaatttgtttttgacgagttttatcaggttattgacattttccttatcagaaatatcggttcttacataaaaaacctctgatccgtttttttcgagctcttttacattgcttacggcttcctcagaaagctctgacctgccgataaggacaagttttattctcccttttcgcacaagatgtctggcgaaaatcagtcccagaccgcctgttcctcctgtaatgaggtaaactcccccttcttttacttccatcttttcggggggctcggcactttcaatttctgcagagtgctttacctgcctgattccatctctgtatctgatttctgaagtatcatcgctgatgattgtttctttcacaaggttttttaattcaggcagaccggtgttcagctgtaactgaatttcgtcgctgtgtatttcaatatttttaccggacaacataggatgttctaaatgaagcgacctaaaaaagccgctgattgccatttgataaggtaagatttgattttcccttgtgaaaaatacatgtgatatcaggattttatgtcttgggattgttgctaacagagctttcgttacattgaaaaccggcaaaacagcctcttccagcttttcacgaatgttctgctcaattcccgtttcagggctcatcccgattaaaatgacgcggtcaattgtcacttgtctttctttaagaatcgccagcaatttcttatagccgtcaagtttgacgctgttcaattcaaaggaatcagcttctttttcttgaaaactgccgccatggcggacaaagatcatgttcaggccgatatctttatatgcctggcggatcagcggttctgatatatcccgacggagtgaaatcacaaggcagctgtttaaaccgctggcttcaggctgatgaagcataggggcccgcttccacatatctgtgtaatacttaactgaatgccgcttatcctgagtctgcggtgcagcccttaatgccttcaacgctaagttttttattttaagacttacagatccgttttcatccataaatagtatatgaaaccttttgacatcatcatgttgtctttcatcggcagctgtaatataagcaaagccgtttgccgaaggtgcgtgaagaatctccagctcacctaattcaaaaggcaaatatgcggtgtgatcgtcttgctgactggacgtaaaccctgttgtggattgaaaaatgccatccaataaacacggttccagcagcgtgccggattttttatgaatgctctcaggaagtgatattcgtgcaagaacagcattttcatggataaacagctgttttattacctgaaaactggttccatagtccaaaccgctctgccggaaatccctgtaacattcagcgccgctgattaatcttttctgtccggttaaccagctgtccaattgaaaacgctctgtatgagaggcatcttgatctccgcatgtggtaatgtttccttggcagtgaactgccgcttcaggttgcatatcggttttcaccacaaatctgccgtctttttgattcggcagcagatctatcattatcgtcttttctttttcaacggttatcggaaccgcccatacaacctgactcagttttatgactgattttccgtacagcctctctcccgcttctctggccgcttcgatgattgccgctccgggcagaaccgttttcccatgcacaacatggtcttttacataatattcagaatcagaaagcgttttataaaatcggcactcacctgctgaaaaatcaaataaaggagctgtaccggctgctgatgttgtttgcgccttatttgacacccacagtctgttttttaagaaagggtaagtcggcagggcaatttttctcggttttctgccggtgcggaaatcttcccagcttaaattgcctcctgatacccaaaattcagccatttcggttaatctggtgccgccggatttgagcggaagatccgattgctgctgtctgcgtttatgattcggttttttccctctaaatatttcgtgatcgtcaattccattataaaagtgatttaatttcaacatcagatcatcgatattatttgaaatgacagcaagcctttccggcatggcttcacgcccttcaagaagggtatacgcaatatcagaaaggtgaagcggcttgtttgttcccgcttgctgtaaaaactcgccctgcttatgacgggccttttgaagatattcctccagctgttttgctgattcccgtaaactcagtgaatgcttggctgagagtacgataagttcctcactttcctcacgcctcgtatgacagtcagcagcagactcatactcttccacaaggatatgagcatttgccccgcccgctccgaaagaacttaatcccgcacgccgcggatatttgctgtcagaatgtttttcattcgcgggttttatccagtcggcggtttcctgctggaggcaaaaaggtgtctcttccagataaagatccggatgcacccgttcagcatgcagtgttgcggctatttttttatacttcatttgtaagataatctttgtcaggccggcaatacccgcggccgcttccaggtggccgatgttagatttaatcgatccgagagagcaatatgaaacatcttcggtataagctctaaacgccttggtcaggcctcggacttcaatcgggtcacccagcggcgttcccgtgccgtgggcttcaataaagctgacacttctggcgctccaaccggccgctttaagagctccttgaattaaatccgcctgtgcggcaggattaggcaccgtatagccatttgtctttccgccatgattaattgccgttcctttaatgacggcgtacacagtatcattatcacgtatggcatctttaagcggtttaagaataacggcccctacaccttccccgggcacgaaaccgtcgccgccttctccaaaacttctgcattttcccgattttgaaagcatccccatctgacacctgtataaatagtcagaaggatgaagatataaatttactcctcccgcaaccgcaaccgagcactcaccctttgttaaactttggcaagccatgtgaattgccgttaaggatgaagaacaagctgtatctacagggacactgggacctgtaaagtcaaatgtgtaagacactctgttcgcgagagaccatgggaacgaatttggaagtacatcgtttttgtccgtcggtattctttcgccgagcagcttgtaagaattggtcgtcactcccgcaaatacaccgacatgtttttcggtctgctttctcaacccttcaatggtatatcccgaatcttcaaatgctttccacacggtttcgagaaatattcgttcctgaggatccatcgcttctgcttctctcggcgatatttggaaaaacaaagaatcaaatgattcagcattctttaaaaatccgccccatttgcaataaattttcccctcatgcgctttagcggggtctggatcatagtaggtctcataattccatcgttctttcggaatttctgtgattgcggttctctcttttgatagaagctcccacaattcttcgatattttcagccccgggataacggccgctgataccgattaccgctatcccgtcaagatgttctttttcctccgccgcaggtgcagtgatgttttgttccggcctggcgggggtaatactctgaatctgttttcctttttcctcccgtgaaaataaacgccccagccgatccggatattcctttacaagatgatctgctaaatctctgattgtatgaaattcaaataaaagcgttttcgaaattgctcccagtgactgctccagctttgtgttgcattgatgaatcataaccgaatccattccatattcagccagatgcacatcttgatcgatctcttcccgttctgcaccgatctcagaggagatgatattggttaaaaacaaaactgtctgatccaaaatatcgccttgagccaaaggaatggcactgactgtctctgtttcgtccgtcaaaaatctctgccgcataaattgttcaaagcgctcatgatcaccgcagactgcaatattatgcagctgacacgaagttacaatccgcgaaaaccattgcgttccgtcttcagcaggaagttcttcgagcccggaaccatgaaaaagagacgtccgcccttgacctgacaggttcgcccccattccgatgtcttgccataaaggccaattgattgtcagcgtgcggccgctgcgcagagaattttgccgtttctgttcccgatattcggcaaaatgatctaaaaagccgtttgcatatgcataatcacattggccttcgttccctgcaatagagacgactgaagaaaaaacggcgaaaaaatccaattcgagcgacttcgttgcatgatcaagattcaatgcaccatgaactttcggagcaatcacctctgaaagttcatgctttgtttttcgaaaaagcagcgagtctctgataactcctgcacaatgaatgacgccatgaagacctgcatgctgatcggtaataccgtcaatcattttttttaccgcttctttatcggatatattcgcctgtatataataaaccttggctttaaagctgttcaggtattctaaatgtttctgcttatctccgtttaaaacagatcgccccgataggataatggtggatctttcagttttcgcgcaatattcagcgactttactgccaatccccccaaatccccctgtaattaaatacactttatctttttcagggtattgaacggtctttctgtttgtttctctctgcttctctaacatccgtgcatatcttacgcagcccctgtaagtgatatgaatatgccgatcaggcgctgtgtttatttctttataaagaatgtcagccttctctgaaaatgaaacggatgcagaatcatgttcaaagcaaaccgtcttacaatgaagctgcgggtattcttgttttaccgattttaaaaaaccgttcacaccttcaaaatacggcaatttttctttttgattcgcgctgaatgtataaatgaacgttactttatttataaggttctcgctgattaaagccttagtcagataaaacacggaataaattcctgattcgagtgtttcttccagttcaggctgtttttcagaccacgtatgcaaaattgcatcgggcgctgcgcctttttcctttaacagacgaatgacaccttgataatcttcgggacgctgcctgttgatcgtgaaaacactgtcgcttatctgctctaaacgctcaccgggcataataagatatgcggacgtattctctctttttttcagctcttcaaaatagtctttattcccggagaacaacaaaatagtacaagcttgtcggctgcccgcttcattctcaattgcggtttctttccataccggcgtataaagtgcctgattcttcttttctgaaaaagccgcgtctgattttaccggctgagggtttaaagaaaattgagagcgctcaaacggataaggcggaagcggggcttttcttttatgataatcacctagtttcgcccattcaatctcttctcctgaaagccacatttgcataaatgaatgatatagagcctcatcggctggtttgtccgcttcaaaagcagccgctttgtttagttttgctgatggagggagcgatccgaattgaaaaactgaaaaatcagaaatattcacatccggctccgttcccttttcttccgtgtgaagcggcatatggtcagctatctcctgagacacggcatccatttgattgtattctgtcatcaacggaaaacgagttttatcataaaaacctgccggctgctcattaatacaagcaacagcctgtttaattccgtcttgctttttcaataacatgctcagaaaaagttctttagacaagattccttcatccagtaaatttaatatttccagaacataatcattattaaagaatccatcataatctgttaaatcccatctcttatacagtcttctcatagaggcaaggatagccatgatcgccgcttcctcatcagccggcaatgcgtttcttttatccgccgtgcgattcacaatataagataaaatctcgatttcctgagtctttcccgctttatcccactcttctaaaaaccctttaaacgtatattggtgctcaagaagcagccgtgttttcccgtacaggcggtctgcaaaatcagcctggaagctcagaccgttcagcagcatccttacatattcttcatttaatcgaaccggcgggtacgtttttgaagtgtacggattgacaaatggaatggacggcggctcacaggatatgtgcgaaagtttttcagcgcctgtgatgacagaaatggccttttcaattttgatgatatccgctgctgcaagagcgacgtaatatccgtctccggcgcctgtaatgaggcttggcttaaaaccggatgccaggatactttttatgatttccgtattgataactaaagaatacaagcggattttctcaggcgtccattttcttttaaatgaactgtgcaatgttggtatacccttcagcaccggccttactttcttttctaaatcagggaacacccgtttcaaaacggcaaattgtttataactttcccatttgaagtcaccgatggcaagcgcccattcagaaccttgtttcctccgaaaacttaatccctctttaagctgatttttaaattcctccttgctgcctgccaataaaccagccctgtaatcaaacgatgtccttgttaaaagggtgctgctgatcacttcatttgatattttgcaaaattcctctgaatcgtcagcaaaggttctccaatgatgtatcatttgtttcatgctttcttcacttttagcggaaaaaaggaagggtatccttccttttctatcagattcgtcttttgtatgtataaattcttcgatgatgacgtgagagttgacacccccaaaaccgaaggagctgattcccgccctgagcggagccccgtctgccgccttccaatcacttgaatcaagcgccggcctaaacggtgttttttcaaactgtataattggatttaccgtatgtacattcaggcttttcggcaccctccggtgtttcatcatcattagaacttttatcaatccggccattcccgccgctgcttctgtatgaccgatatttgttttcacacttccgatcctgcaatattgagtatcctcagtatattgccgatacgcttttgtcaatgcttctatttctatcggatcgcccagagatgtacctgtgccatgtgcttctacataagaaaccgtcgcagcatcgacagcagcgttgtgtaaagcttctgagatgacccggcactgcgcttctgctctgggagcggttatggaacgggatttaccgccatgattaacagctgtcccttttatgatcccgtatatatggtgaccggcttttactgcatcaccaaggcgctgcagcaatacaacgcctgccccttctccgggaacgtacccgttcgctgctgcgtcaaaggttttacatttgccgtcaggactcagcattctggctttggaaaaagaaatatattttccgggttggaaattcaagtttactcccgatgcgattgcataatcgctttcttttgtccgcaatgacttaaccgcttcatgtaaagcaacaagcgatgatgcacaagcggcatttacagacatgctttttccggtcaaaccgaatgtgtatgaaagccggttggaaagcatagcttcgaaacttcctaaacaggcataactgtcgatttccgattcagcatgacctgtctgccggtagtcagaattcataatacccgcaaaaacagaagtggttttacgctggagatcctgcaaagaaaccccggaatcttcgatgcaccgccaagtttcttctaaaaggattctttgctcaggatccatgtttttcgcttcccggggagagatattaaaaaacttatgatcgaaatggtcagctttatgaataaaacctccccacttgctgattgttttgttcggtatactgatatcagctgaataataaagatcgggatcccaccgttcaatcggcacttcccggatggaatctttgccgctatttatgttttcccagaattcatgataatgatctgcatcggggaatctgcaagcaaccccgattatcgcgatatccgcactctgtttattcaaatgaaccattggcctccacccgccccttctttagtgtagaaataacgtatccaatctgcgccttagcagactttcggtctcattcatcaatttttcaccaatgtcatcgacatgtctgtttctccatgattccaaatccgtgccctttacccaatgattaaaagcgcctaaagacgggccgcaatgaacttggaaattcaccttttgttcttcctgcccttccaaagcaagcagacatcctctctgcaaataccacttaaatagtaacagcatcttatatttttgattgcgctcagctttttgggcgaggttcggctgtttttctattaagctttcgtagatttcatcaaaagttttgttaaaataatcattttcgagctgaatctttgtcttttcatctatctcactcaaagactcatattgttggtagatttgaaataatttatttgccctgaccggaaacagcgtgccctttttcagcacctgaacttttgttccgaactcaaacagagtctccgaaggcgcataagcagtatcgcatattcctgtctcactcagcatttctttaacaaaaccgcttgtttcggcttcaactgtacattgattaatggatcccgtcataataaaatcagcgcccattaaaaaagcagacgcggcagactcgggagtcccgattcctcccgcagccccgatccttatcttccttgcgtatttgtgtgtttccatcatttcatcccgcaggttaacaaaaaacggcagcatcgctggcaatgagccctgttcagtattacttccgcaatctgcttcaataatgatatcgtctgctgccggaatacggctgagccactccgcctgctcttccgtcagcataccgtgctgacacattctctttacgatactttgaggaggcggactcagaaatgcggccgcaacttccggccgtgaaactttggcaatgatccgattatgaggtatgaccctgccgcttttgtctatcttcaactgatgcgctttgtaataaattaatggtgcgctgacagaaagatacgaagacgcttctattactcgtacgtcatgcttgatatataaatctatcaattccttttctctatcttgatgatccggctcaaatcgcagattcattccgtagggctggccatttttgagtgtcttcttaatagaaataagggcctgttcaatttcccttataggtaaacccgctgtgccaaagaaccccagcattcctttcttcccgaggcggatcagcatttcagcggaagagatccctctatgcatcccacctgccaaatacgcgtatgtcaaaccgtaatcttctttgaaagattgatcacccaatcgggacaccggtgaagctgcaccgctctctatattttcagccaagaggctatgctctttcccgctttccgaattgtccttgttcccttcagaaaaaaagagactgtcttccggcgcactgatagtaagcggttcctcatctctttgtatggtttgaattaatttagtcagaatgttgccaggaccgatctcttcaaacagagtgacgccttgtcccattagatacctgatgctttcagtccattttaccgagtttgttatttgttcaattaaattccgtttgatatcttcttgtttataaggtcttgccgtatagttggaaatgaccgggaaattcaattcagaaaaatgaaactcctcgataaattccgcaaattcacgctgtgcactttccatgaaacgagaatgaaaagctccgccgacttgcaatacgatataagctttcgccccttctttttcaaaaaaagaggctgcccgctttatctcttctgcagcccctgctatcacaatttgtgaagatgtattgtaattggcgatatctatttggccgagttcatacttttgaagtattttttttatgtgatgctcatccagtccgatcacggcagccattccgccctcggaagcctcactcattaactcgcctcttttagcaaccagccggagacctgtttcaaaattaaaaacgccggccgcaaaaagcgcagtatattcaccaagactatgtcctgcaacagcatcagggcgggtatgaccttcttttaaaccctttaaatattgcagtgcgctcactgtataaattgcaggctgtgtatacttcgtatcagtcagcctctctttttcatctgaaaggcataaatcctttatggagtatcctaaaatatgatctgcctttttaatgagctcactgaattcatcgaataagtctctgcccattcctttaaactgcgctccctgtccgggaaagacgtaagcaagcatttgttttcctcctgttccgtatttctgccgtttcttttcgttccgattttgattaacgtttttcacttcaattttaaaattgccgtttactctcagcacccttacttaataagcattactaagcaaaataaaaaaacctttatgccggataaaggtttaaaagcaaaaagcatgtacaaatatcatatcgccgtaaatataaatagatagaattttctgataattaaaatcacattttcattctgttttatatatatcaatataataaaaacattccaacgtgccgaaacaacgattggttttatgtgaatatttccctaaataaatattataccatgatttacttgttgtcaatgggaaacacacgtatataccaattcttcagccgcctttttacaggcggctgaactcggttgttatcagttcatcagcccatgccgatatgccttcactatactatttgcggaataatagttctttctctttgttgtagtctttagtaaattgattgaactcatctgcttgtttatgcaccttttcgtaaactgagtttactttgctgatttgctcttccagctgcgctaatgtgagctttttatctttaatcagcttataaaggtccttatcaagtgatatggctttttcgtactttttgtacaaaagatcataagatgcataccttttccccattaaagcgacagcatgcccggctttttcttttactttcttatcctttatttcttgagaagttttttttgcggattcaaacgctttttttgaatcatcaatactgtctttttctgctttcagatgtttttttcgctgatttgcattgctcagagcctgatcagacagtgtgacaattttctggtaatcatccatattcagtttaaccgcgctgtcgtatagctgatgctcttttttctccaatttttctaatgttttctgctctttttgaaacggtttttccgcttgaacggctttttccatcgagtcatgaagcgattcaaccggatcttttcccccgcagccggcaagcagcatacttgcggcgccgagcgctccgattcctgctaatacctttttctgaatcatattcacttagaatcccccaatcttgacaatttccactatagaagcccagacgctttttgacaatagctgagctgtaattggcatgaccgtgtaaagacgcttacggtgctttcaaagaatacttgcgtaaaaaattgagaaaacagggcggatgaccatacatctttttggcttttacatagtttatagtagacgccggccctgctgacagagggtcagcgtaattaaaagaggaggtttttttatgtacggatatggatttggcggcggatttggcggcggttgttgcggcggcggatatggttatggcggcggttacggttacggctgcggcggcggatacggccgcacattcgcattaatcgtcgtattgtttatcttattaatcatcgtcggtgccgcttatttaggctgcggctgctgacattatacaccatgacatcggccggcctgctatggccggccaattgtttcattgcgccgcgataaagaaattcgctataatttacatattaagctttaggagtgaagtttcttgattactatggaaaatattgtacgagacggacatcccgcgctcagagagatcgctgaagaggttcagcttcccgcttctgacgaagaaaaacagcatcttgctgatatgattgagtttgtgaaaaacagccaagatcctgaattagccgagaaatacaagcttcgtccgggcgtcggtcttgccgctccccaaacagacgtaaaaaaacggatgatcgccgtccatgcagaagatgcgaaaggcactttatacagctatgctctttttaaccctaagatcgtcagccactcagtggaaaaaagctacttgacgagcggagaaggctgcctgtcggtagacgaacccattcccggctatgtgccgcgctacgcccgcatccgcgtaaaggcggtgacgcttgaaggagaacagattgacatccgcctcaaaggttttccggccatcgtgtttcagcacgaaatcgatcatctgaacggcgtgatgttttacgaccatatcgataaagaaaatccgttcaaagaacctgaaaacgccattgccattgaccgttaaaaataaccggcacttcccaaagtgccggttttctttatttcaaaaggcccagttctttgacggcccagctgattccttcctcatccaccggctttgtgacgaaatcagcggcagcttttaattccggaaccgcatttcccatcgccaccccggtgccgacaaaacggatcatctcaagatcatttagtccgtcgccgaatgcataagtgtcacttacgccgtacggaagccgctcaagcactcttttaatgccttccgcttttgaaccgcctttcggaagcacatccgttgacaattcatgccagcggacgtaatcaaactccggaaaagcgacatatgctttttcttcatgtccgcggcagaataaaagcagctgataaatttcttttcctttataaaatgtttcatcaacttcgggataaggcgctttcagactgccgattccttccgagacgtgcggatgtccggggacggtcgttttcatcgtgtcttccgccataaatacgacggggtgctccccttctgccgcctgctttaataaacgcgcaaccgcatcttcaggaagcggatttttataaatgacctcaccttcaaatacgacatactggccgttgtatgaaataaatgattcaatctcaagctcttccagaatcggttttaccataaacggggaccttccgctggcgataaaaacgtgatggccagcctctttaagcgccgtcacggcgtttcttgcgctatcgggaatatgtttatcatggtcatagatcgtgccgtcaatatcaaaaaagatcagttttggattcatgtcaatttctcctttttcccgtttatcagtcgtgtctttttcaatatcatcatacagaaagtttttcttccggaaaaccgccttgatgaaattccagttttacccacgaaaacaaattcattttttccgcatactactgctataaaaggctttaaaggaggtatacgatgctgcgccgattacggaagaaactcagaagacagtggggcggaatgctccggaaaaaagtcatcgcgtagaagggatctttcggtttttgaaagtcccttttttgctcgagactttccttataatccgttttcgaatataatagaataagcgagtctaacatacggcatttaaggagagatttggatgatttataaggtattttatcaagagaaggctgacgaagtacctgttcgggaaaaaacagattcactttacattgagggcgtttcagaacgggacgtcagaacgaaactgaaagatcagaaatacaacattgaatttgttcagcctgtggacggtgcttttttagaatatgagaagcagagcgaaaattttaaagtattggagttatgagcggaatgaaatttgtaaaaaatgaccagactgccgttttcgccctcggcggattgggcgagatcgggaaaaatacgtacggggtgcagtttcaggatgaaattgtactgattgatgcgggaatcaagttcccggaagatgaacttctcggcattgattacgtaatccccgattacacgtatttagtaaaaaatgaagataaaattaaaggtctgtttatcacccacggtcacgaagaccatatcggcggtattccgtacctgctcagacaagtaaatattcccgtttacggcggtaaactcgcgatcggcttacttcggaataaacttgaagagcacgggctgttaagacagactaaattaaacatcatcggtgaagacgacatcgtgaagttccgcaagacgtcagtatccttcttcagaacgacacacagcattccggattcatacggaatcgtcgtcaaaacaccgccgggcaatatcgtacataccggggactttaagttcgatttcacaccggtaggcgaaccggcaaacttgacaaagatggctgaaatcgggaaagaaggcgttttgtgcctgctttctgacagtacaaacagtgaggttcctgatttcaccatgtcagaacgccgcgtaggcgaaagcattcacgatattttccgaaaagtggacggcagaattatatttgcgacattcgcttcgaatatacaccgtcttcagcaggtgattgaagcagccgttttaaacggcagaaaagttgccgtattcggacgcagtatggaatcggctattgaaatcggacaaaatctcggttacattacctgtcctaaaaatacgtttattgagcataacgaaatcaatcgtatgcctgccaataaggtaacgattttatgtacgggaagccaaggtgaaccgatggcggcgttatcacgtatcgctaacgggacgcaccggcagatttccattaatcccggagatacggtcgtcttttcttcctctccgattcccggaaacacaatcagcgtaagccgcaccatcaaccagctgtaccgtgcgggcgcagaagtcattcacggttcattgaatgacattcatacatccggacacggcggacaggaagagcagaaattaatgctccgcctgatcaaaccgaagttctttatgccgattcacggtgagtacagaatgcagaaaatgcacgtcaaactcgcgactgattgcggcatacctgaagaaaactgctttatcatggataatggcgaagtgctggccctcaaaggcgaagaagccgctgtggcaggcaaaattccgtccggctccgtttacattgacggaagcggaatcggtgatatcggcaatatcgtgctccgcgaccgccgcattctttcagaagaaggccttgttatcgttgttgtcagcatcaatatggacgactttaaggtttcggcggggcctgatttaatctcaagaggttttgtatacatgagagaatccggtgatttgatcaatgacgcgcagcagctgatttcgaaccatctggagaaagtaatggatcggaaaacaacgcagtggtccgaaattaaaaacgaaattaccgatacacttgctccgttcctatacgaaaaaacaaaacgccgcccgatgatccttccgatcattatggaggtctaaaaaaactgcactcgtaatgagtgcagtttttttattgcagcggaatatgctgaaaggctttgacatcaaacagaccggctgctgtcattttaatatccggaatcaccggaagcgctaaaaacgataatgtgagaaacggattgaaatcaccggtgaatccgagcagaggaagcttttcatgaagtacgcccaagctgtcattgacccattccgccgacttatcagacaaaagcccggcgatcggaagcggaacggagtgaagcaattctccgtttttcacggctgttaatcctcctccggtgtcacggagcctgttgattgcttttgccaaatcggcatcgtttgtaccgacggcgatgatattatgggaatcgtgagaaatggttgtggcgatggcgccttcttttaacccgaacccttgtacaatcccgagtcctatcattttttcgccgctgtgccgctctgtgacggcgatttttaataaatcattttctgtatcaggacaaaacgcgtcagcagacggtgcaggcacttctttttttctcgtctccaaatgattcggtatcatttcgattactttcattttcctgccctcatgaatcggcatataaaaatcagattcagtcagcggcgatctcagccgcactgtatccaacagcgcctggtccggcgaataggaaccggcagactgttcataaaccgttcgtccgttctcggcaacggtccggccggcgaccatggtcttcgtgacggcagcctcccgtacatctgaaatgaacagcagatctgcgtcaaaacccggcgctaccgccccttttgtttcaaggccgtagcactcagccgcatttaagctggcgagctgatacgcaaggaatggatcaagtcccgcctttatcgccattttgacttggtggttcacacttccttctgaaagcagatcatctacatgcttatcatccgtacaaaagaaaaagcggcgcgcgtttttttcattcactgccggcagcacattgagcgtattttttgccaccgatccttcgcgcagcatgacatacattccccgtctgattctgtccagcgcttcttcttttgtcgtcacttcatgatcatttgacaccattgcggttctgtatatattgatgatatctgaagacagtccggctaaatgcccgtcgatccgttttccgtgacgcttggcatcaagcagtttctgaagcatatcctcttcaccttccgcaacagacacataatccattacttccgcaagtccgagcacctctttctcctgataaaaaggctttaaatcctcggcttttaatacggctcctgagcgttcaaagctagcggcgggaacacaggaaggaagcatgaaacggatgttcagcggcgcctttttcgcctgctctatcataaaagaaatgccttttgctccggaaacgttcgcaatttcgtgaggatcagtaatgacagtagtcactccgtgtgggaggacggctttagcaaattcaatcggagtaaccatagaggactcgatatgaacatgtccgtcaataaagcccggaacgatcatttgaccttctgcatcaatgacttcttccccttcatattcgcccagcccgacgatcactccgcccgtaatggcgatatctgcagaaatccattcctggttaaatacatccatgatttttccgtttttaatgacggtatcggctttttgtctgccggctgatgcattcagccgttcagccagtgtttctttgttcaaaatgaggcctcctctttttctgtatatggtacaatatgctatcggatcgcctgatcatagtcaataaaaattgcagaaaataccgcttacacgataatgtctttctattctgacataataaaagaccgtccttttacggacggcttttcactttgtgtgaagcactcttttttcaaatcgggaaatgtccgtaagagagccgataacgatgagaatatcttctttttggatcatttcagtcgccaggggagatacgatcacttctttttctctcttgatggccacgatattaatgccgtacttcgcccggatgtccagatcaagcagtgtgttgcccgcaagcctgctgttggccacgatctccacaatgctgtgttcgtcggacagctccaaataatcaagcacattatttgatacgatgttgtgggcgatgcgttttgccatgtcacgttcagggtggacgatgtgatcggccccgattttcgcaagcactttctcatgataatcgttctgcgctttaaccgtgatcgtgttcacgccgagttcctttaagatcagcgtcgttaaaatgctcgcctgtatattttcgccgattgccacaatgacgtggtcaaagttgcgcagccctaagtttttcagcaccgattcatcggttgaatcgccgatgaccgcgtgtgatgcgattttggcgtattcatttactttatcttcatcaatatccatcgccatgacctcaaggccttcttcacttaatgctttgcaaatacttccgccgaagcgtccgagaccgataacggcaaactcttttctcataacagtactcctttaaacaatatctctaataggaatagtatcacattttcggcaatgagttcatatagcgtttaagcttttctgaaaaggcgggcgataaatacagatccgctccgcgttcgatttcttcctgatagtgacccggaggcgcaatttcctcagctttatcaagaacgagaaacgtcaggacgcctctgtatacacggccgccggcacacacttctatgaacgcgggacggtatgtgtggttatcaacaccttctcttttgtacagataggttgccgcttcaaacgggagcttgtacagcacgccttcagttcgtcccccgtcttcaacaagatcggctctggaaccgtcaggacgccttaatgtgaatctcgtcgaatacccttcaacaaccgcccctccgaccggctcggcaaaaaagtggtcgacccccgcctgtttaaaccgggcattgtccatacaggagccgtaagcgaaataataaaccggactgtcatcctcccgtttcataaaacggtattctttccagtctccgcttttgatacggctgaatgaagcacactggtcgggctttacgacatatgcgaaggcggttttattcccggcatccgtcgtcacggcaacctcttttcgatcaaaatcagcataatacgcatccagcttacggatcatctgatgatctgtttcatacaattccccgtacacaaaagctgtttcttctaaagacgccgcaggctgacctttatccgtttcgtacagcacgccgtttatcgcagcctgctcgcacacacacggagcgcctttcagcagttcatggttttcttcacgcttccgtaacaaaccgtatacaaaaagaagcaagttatttttcctccttttggacagcagccgcttctaacggcagaatcacctgaaacgtactgccttctccatttttgctcttaatgttaagtttaccattatgctccttcagaattcgtaaacaaatcggaagcccgagacccgttccctgatcttttgttgagaaaaacggtttcccgatgttttcaagcttttctttcgacatgccgtttccttcatcctgtatgctgatcaccgcgtattcttcatcccgttttgtataaatatgaatattcccgccgtcaggcatcgcttcaatcgcatttttaataatattgataaatacctgtttcagctggttttcgtcaccgttgaccatacaggactcagtctgcctgaaatccttctcaatcacagtgttcgacagcaccgcgttcgtgtcaagaagcgtcgccacctgccgtaaaatatggttgagatgatgagcggtaaacgtcacggtctgcggcttggcgagcagaagcagctcccccagcacgagatcaatccttttaatctccgaaaaaataatatcaaaataatccgttctttccggatactgggctttcatcagctggagaaagccgctgactgacgttaaaggatttcttacttcatgggcgattcctgccgcaagctccccggcaatggccagcttttgagattgcatggcgaggcgttcgttcgtttccagaagctcatcgacagcttttttccgttcactgatatcagacatcgtccccaggcttccgacaaatttctgtctgcggtcataatacagcttataatggacttctccccaaaagatcgagccgtctcttttaatatatttggccgtaaacattcctgacggggactgctgcttgatttgggagataatataatcaatgatatgtttttcttttataaaataatcattatacatcgtgcccatacattcgctgatggagtggcccgtaatcgccgtccaggcctgattcaaatatgtaatattcccttgagcatccgtctgaaaaacgatttcctgcagattgtccatgatccggtttttctcatctgaaagcgcctttgctttctgctcgctgtccttcagctccgccagcagctgctttttattatccacataataagccagcagccagacgctgattaatgtgacggcggtaaaggtgatgtcaacgggccagttaatcggattccgttcaatcatataaaataaataatcccaaaacataataaaaatcattgccaagattaaggaaatgatacgcgcttgatattttcccatagtcccacctgccgctagcatttctacatatattgtaacattgttgactgcattattgactaaaaaatgataactattcccaattaattgagcaggttcgcttacttttcccgtgagtttttgcacaagttcataataaaaggacggaatgatgctccgccctttttgctgattatgatctatcttttaacgcttcctcgatttcctcaagcagcattttcgctccttcaggacttaaaataattttgccgttgccgtactcctgattttcgggagtaatttcccccgtcattaagcaaatgccgtgcggcttgtattttttcaagacaattttgtctccgtcaacgaaaaattcaatactatctttaatagcgatatccaatgctcttctcaattcaatcggcatgacaatacgcccgagttcgtctacttttcttactacaccaattgatttcatagaaatcccctacttcctttaatgtctcttctttatgtccaaggaaaatccttcataaacgtagacgaaaggaacggagcaaaagtttctcagcatccggaactgaatgtttttttacagaagaaaatccttttgaaatatgggatacagactttccctccttttttacaaaaacatttcattcccggcggaaacccccaaaaatcgtggtttttctcagaaactttaaatgtagaatcaattaaatcaggatagggattgggtgaaaacatgtttcaatcaactgagatcggaatcgacttaggaaccgctaatatacttgtttacagtaaaaataaaggaattattttaaacgagccttccgttgtcgctgtagatacaacaacgaaagcggtgcttgccatcggaacggatgccaaaagcatgatcggaaagacgcctgggaaaatcgtcgccgttcggccgatgaaagacggtgtcattgctgattatgatatgacaactgacttattaaaacacattatgaaaaaagccggaaaaaaaatcggaatgactttccgcaaaccgaatgtcgtcgtctgcacgccttcaggctcaacagccgttgaacgacgcgccatcagtgacgctgtcaaaaactgcggagcgaaaaacgttcacttgattgaagaacccgtagccgctgcaatcggggccgacctccctgttgacgagccggtcgcaaacgtcgtcgtagatatcggcggcggtacgactgaagtcgccatcatctcattcgggggcgtcgtatcctgccattcgatcagaatcggcggcgaccagcttgatgaagatatcgcctcgttcgtcagaaaaaaatacaacctgctgatcggggaacgtacggcagaacaagtgaaaatggaaatcggatttgcattgatcgaacatgtgccggaaacgatggaaatccgcgggcgtgaccttgtaaccggtctgccgaagacaatcagactgcaatctaatgaaattcagcacgcgatgcgtgagtcgctcctgcatattcttgaagcgatcagagcgacacttgaagattgtccgccggagctcagcggtgatatcgttgaccgcggcgtcgtgttaaccggcggaggctcccttttaaacgggatgaaagaatggctgacagatgaaatcgtcgttcccgttcatttggcggcaaatccgcttgaatcagtggctatcggcacgggacgttcattagacgtcatcgacaagctgcaaaaagcgattaaataataagattgtgcttcttttttctccggccggctcatattgtgagaactggagaaacattaaggaggaagcatatgcttagagatgtgggaagacgcgtagcagtagccgtcattttaagcggaattattttggggggtatgagcatttcactggccaatatgccccattctccggccggcggcgccgtaaaactgaatcacccgtaaagacgcagcaaaagctgtgtctttttcgtttgtgctcctttctttcctttatgaggcgatatttgatatgatgagaaaaaccgatgaggaggaatgaacgatgagttcgtttactgaaaagttacatacatatgctcagctggcggtagaagtcggcgtcaatgtccaaaaaggacagcatgtcgtaatcaatgcctcaactgatgtccgggaacttgtcagactgcttgccaaacattcttatgaaaaaggcgctaaaaacgtcacagtaaattggcaggacgatgaactgtccagattaaaatacgagatggcaccttttgaagcgtttgaagagtatcctgaatgggaagcaaaaggaaaagaagagctcgcgaaaaaaggggctgcgtttatttctgtcgtctcatccgaccccgacctattaaaaggcactgacggcaaacggattgcagcgttccaaaaagccgccggaaaagcattgcatacatacagacaatatattcaatcagataaggtcagctggacggtgatcggagccgcttcaacaggctgggcgaaaaaagtgttcccggatcagccggaagaaacagccgttcagcttttatgggaagaaattttcaaaacgacccgcgtaaatgaagaagaccctgttgaagcatggaaaaaacatgatcaaaaccttcatgaaaaagtggaacacttaaacaaaaaacattacagcgccctgcattatcaggctgaaggaacagacttaaccattgaactgccgaaaaaacatgtatgggcaggcgcaggaagcgtgaatgaaagcgggcacgaattcatggccaacatgccgacagaagaggtttttacccttccgcagcgtgacggggtgaacggcacggtttccagcacgaaaccgctgagctacggcggcaacattattgataacttcactcttacctttgaaaacggccgcattgtcgatgtgaaagctgaaaaaggcgaggagattttaaaaggcatcgtcgaaaccgatgaaggctcacactatctcggtgaagtggccttagtgccgtacgattcaccgatttcacaatcaaatattttattttacaacacactgtacgatgaaaacgcctctaaccacttggcgatcggcagtgcgtatgcctttaatattgagggcggcaaacaaatgacacgggaagagcttgtcaaagagggcttaaatgaaagcattacacacgtagattttatggtcggttccaaagacatgaatatcgacggcattaccgcggacggcaaaagagaaccgatcttcagaaacggaaactgggcattttaataaaaaaaggaggcgatcaggcctcctttttttatttcgcttcatacatttgcaagttggcgcagacggtttccaaaacaggtgtatcaactgccaagcctttcgctttctcaagcaaaaatccgtgtaaatgatcaccttccgtcaccctgcccttttccatatctctcagcatcgacgatttcatatggtaagacatgcttgtcaatgtgcgataactctcttcttccagaccaggatctttcgggatgccggcagccttgaaaatggctccgatttcagcaaagaggcgctttgccgtgttgcggccgccttctgtatctaaaatcggtccgaccggctgttgaaacagagtggtcactcccgcctgcgcggcaataaacatatattttttccaaatgtccttttcaatatcccggctgatgatgacatccgctttcacacctgcaaatgcgttttccagctcgttcatacgttctgtgcgttccccgttccattcaccgaaaacaaagcggtgggcagcgctcgtatgaagaatttcccctttgtcgttaagggcgctctcaataaagcagaggccgcccagcacctgccgttttgaaaaagcttcaaacagctggtgatagtgcctgtatccgtttaaaaaaggaataatgaccgacgaaggtttgacaaacggtttgacatcccgaatgacgtcctgcaaagaatacgcttttgaagcgatgataaccgcgtcaaatgctccttcttcgcccgccatgattaatttcggcttgattgaaacatcacctttttcacttttgacggtcaatcccgtctcttgtaattgttccgcccgtttcttgcggacgagaaacgtcacgtcatttcccttttctgcaagacgcgcgccgatatatccgcccactcccccagctccgacaactaaaaacttcatgatgcattcctccgtctcttttcaagttatgtattcatttattgtaacgggaagtcagaagattgaaaacttttttcataaataaaaaagcagagtctcccctgcttctttattacgcgtatagctcttcaagctttttctgtacatccgcgttttcaagaaattcgtcataagacatttgtttgtcaacaatgcctttaggcgttaattcaatgatgcggttggcaattgtctgtacaaactgatggtcatgagatgaaaacagcatagcgcctttaaagctgattaagccgttgttaagcgccgtaatggattccaaatctaagtggtttgtcggttcatccagaattaaaatgttcgcgccggaaagcatcgcttttgaaagcatgcagcgcactttttctcctccggaaaggacgtttgattttttgttgacttcttctcctgagaacagcatgcgtcctaagaagccgcgcagaaagctttcgctttggtcatgcggcgagtattggcggagccagtcaacaaggttcgcatcgctgccgtcaaaatactcgctgttgtctttagggaagtacgcctgagaagtggtcacgccccatttaaatgtgccgctgtcagcttccatttccccggaaatgattttaaacaatgtcgtaacggcaagttcgttgcgtcccgtaaaagcgattttatcttctctgttcataataaagctgacgttatcaagcaccttaaccccgtcaatcgtttttgttaagccttcaacccgcagcacgtcatttccgatctcacgttccggcgtgaaattgacataaggataacggcgtgatgacggtttgatatcatcaagcgtgattttatcaaggagtttctttcttgatgtcgcctgctttgatttagaggcgttggcgctgaatctggccacgaactcctgaagctgtttaatctgctcttcttttttcttgttggcctcctgagaaagctttaaagcaagctggcttgattcataccagaaatcatagttgccgacgtatacttgaattttattaaaatcaagatcggcgatgtgcgtgcacactttatttaaaaagtgacggtcatgggatacgacgatgactgtgttctcaaagttgattaaaaactcttccagccactgaatcgctttcagatccaagtggttggtcggttcatcaagcagcagaacgtccggcttgccgaacagcgcctgtgccaagagcactttcaccttttctgaaccgcctaagtcagccattttcttcgtatgcaggtcttcagagatgcccaggccctttaacaaaatagcggcttcactttcagcttcccatccgtttaattccgcaaactctccttcaagctcagcggcgcggatgccgtcttcatctgaaaaatcaggcttcatataaatcgcgtctttttcctgcatgacttcgtataaacgtttatgtcccataataacgactttcagcacttcgaagtcttcatattcaaagtggttctgcttcagaatggcaagacgttcgcccgggctcatatggacatcgccggtctgcggctccagctcaccggataaaattttcaaaaatgttgattttccggcaccgtttgcgcctattaatccgtagcagttgcccggcgtaaatttaatattgacatcttcaaataacttgcgatccgcaaaacgcaagctcacattatttacagcaatcatttagaatcctccatcgtgtctatcatcattaaaagtataccatgaataaaggggaagagaaatgtttccctgcgaatatacgggtttgaaaagatgcaggcaaacccggagccctgtgatacaatagatatatatacatattcatcacggaggaacaagttgaagcttttaacactcacagaatattgtcttatgattttctttaccggggtttttctggccgtcacaggctttaccgcacgtgacatcggcttgtacgtcggaatcgccctcatttatacgttttcgcatctcttttcaaaacggatgcttgaaaaacgcggcaaagagaagcagcaggtgaatctttttttcagcgttctggccattgtcggatcagtgctggccacggtattgttcatcgccgtcgccgcctcgtttgccaaataaaaaacgcctgctgtccaaatcgggcagcgcggcgtttttattttgtctgacgcatatcatgaaatgggaagaacacaaacttcgaggtgccgacgatccggttttcggcaattaaaccgagtccgttccggctgtccattgagttcagccgattgtctcccatgacgaagtatttgcctttcggaacctttacggggccgaaatctcccgtcaggttgactcccagttttttcgcttcttttttattgctcgcgaggtacggttctgcgatttttttgccgtttatataaagcgtgtcatttttcatttccaccgtttctccaggttttccgatgagccgctttacataatggactttcgatgtatcgccgttaataatgacgatgtctccccgctcgatttctccgatataattgacgcttttgttgacaaacagcctttcaccgtcatgtaatgtcgggtacattgatgatccttccactaagtacggttcaaacaggaaatggcggattaacagcgcaagtgcaaccgctataatgatggcctttccccattcccaatatgtgttggattttctttttaccgatttttcagaagtaggtttttgttcttcagtcaacgtggttcctcctagacgatcactgtttcagttcatgtaccatctttactttatcataactcatcataaaatacataacgcttctatgcgtacatgattgaaaaaagcgcccgtaaaggacgctttttgcttatttctctacaaccggttttttgacgattcccaagataaccgccgttataatcgctccgatcacgatgctcattaagtaaagcagcggatggttcgtaatgaatgcaacgaatattcctccgtgcggtgcaggaagcgttacccggaaaaattctgtcaacccgcccgctaccgcagaaccgacaacggctgcagggatgacgcgaagcggatcagccgctgcaaacgggatggcgccttctgtaacgaaagctgctcccatgaagtagcacgtaataccggcttcacggtcacgtttagagaatttgtgtttaaagaatgttgtcgccagtgcgattccaagcggcggagccattccgcccgccatgatggccgcatgcggcgcatagtttccggcatcgatcatcgcaattccaaaagtgaacgccgctttattgagcgggccgcccatgtcgatagccatcataccgcctaaaataatacccattaaaacaagatttccagttccaaggctttcaagccaatttgttaagaaattcataaacgctgcgacaggagtgtttatgacaaattgcatcagaactcctgtgataaaaataccgagcagcggataaatcaatacaggttttaatccatcaagagattgaggaataaagacaaacagctttttcagcaggatgacgacataaccggctaagaatccggcaatcagtccgcctaagaatccggcattcgcctgcgtagccataaatccgccgaccatacccggcgcaaatcccggacggtccgcaatactcattgcgatgaatccggcaagaactgcaacaatcagctttaacgcattaccgtcaccaataaagttcagtgctgcagcaaacgtgttgtatgtcgggtctttcggatcagctgaatgaattccccagaagaatgagatcgcaacgagaattccgccgccgacgacaaatggcagcatgttgctgacaccgctcattaagtgtttatagaaagtacttccgatgcttgttcctgatttctgtttcgggccgtcctcatttgaagcggaagatcctccgccgctgccctcgtaaatcggcgcatcttggttaacggctttttcaatcagttcctgaggacgtctgataccggccgtcacaggcacttgaagaacatgtttgcctttaaagcgttccatttcaacctgtttatcagccgccacgataatcgcaggcgcgtcttcaatttcttgagccgtcagcttatgtttgataccgcttgagccgtttgtctcgactttaatgtcaacgccgagctctttcgctttttccttcagtgcgtcagctgccataaacgtatgggcgatacctgtcggacatgccgtaacggcaaggattttgccttttcctgacggcgctgcctgttcttcctgctcttcttcttcctcatcgtcatctttgtcatgctgattgatgatgtcaatgatcgcatcttctgattcagcttcaagaagctgtttgcggatttcctcacgcatgagaagcgttgaaagtcttgataatgcctcaaggtgcgtattattcgctccttcggttgccgcaatcataaagaccaggtgtgccggctgaccgtctaatgattcataatccacaccatcttttgaacggccgaatgcgatggccgggttaatgacgctcgccgtcttcgcatgaggaatggcaatgccttcgccgattcccgtcgagctttggctttcacgatttaaaatggctgctttgtaagcctctctgtcatttaatctgccggctttgtcaagcactgtcaccatttcatcgataacgttttctttctctttgctttctatattgagatgaattgtatctcttgttaacagctcagttatcttcacttttcttttcctcctctatagacgtgtgactttaacttcaggaagaagctgctgtacaaactcttcagttccgagttcttcagaaaatgccgtcgcgcttccggaagcaactcctaaacggaacgcatcttccaaaggcagctgttttgaaattcccgcaaggaatcccgcgacgacggaatcacccgcgcctaccgaattgacaagctttcctttaggaacattggcgaggaaaaccgcctctttcgtaaataaaagcgcaccgtcgccagccatcgaaacaatcgcatgttcagcgccttgttcaatcaattttttaccgtaaggaacggcagcttcggctgaatcaatgaccgtattgaacatttccccaagctcatgatgattcggtttcatcaaaaacggtttcatttctgtcgctttcatcagcgcttcaccggagatgtccaccactacccgggcattctgctttctgcatgcctcagcaattttttcatacgtgttatgcggcagggaagaaggaatgcttcccgctaaaacgacgatgtctccttcttccagagcggagaactgttctaaaaaggcattgaacacttcgtctgaaatcgtcgggccctgtccgttaatttccgtttcatcgcccgttttcagttttacatttatacgcgtgtcttcatccacctcagaaaaagccgtttccagaccttcctgctgcaaaaatgacgtgatatagtttccggtaaatccgccgacaaatcccaatgcttttgacggcacatggtgtcttttcagtaatctcgaaacgttgatgccttttccgccgggatacttcgtgtcatagctggaacggtttaaaccgcctacggcaaaatcttcaacgtgaacgatatagtcaacagacggattgagggttacagtgtaaatcatggtttcactacctttacgacagttttttcttggtaattatcgaatgcaagttcttcagcttcagtggtaatgatagcggcatcgcccaaggcggcgaacgctgcgaaagaaatctcgccgaatttagaaggatcggctaaaacatacgcatttttcgcctgtctcacagcctttgtcttcagaagagcctcatccggatcgggtgttgtaaagcctgcttcaatgtgcacgccgttcaccccgaggaagcttttgtcaaaacggtactggctgaccgccgttaatgaggcgccgccgatcatcgcacctgttctatgcttcacatatcctccgagaagataaaaggggatccctttccttattaaagcgtcgatatgcataactccgtttgtgacaaccacaatgtccttagatggatctataaaatcaatcatgtgcaatgtagttgttcccgcatcaagataaatacagtcaccttcttctaataaagatgccgcttcttctgcgatcttcagtttatcctgaaggtttttggaggatttttcaagcatatcgggttcttgcctgctgttggaaagtttagacgccccgccgtgaacgcgctttaaaaatccgcgctcttcaagtgttgataaatctcttctgatcgttgattcagaagcatttgtcatgcttatcagctcttgaatcttcaccacatcacgcttttcaatctgatcaataatcagctgatacctttcaggagtgagcatattccgcctcctttggaaacgtattcatttcggctgcaagataattgtaaacgctttttttacttctagcaactaaaatcactcaaattcattcaataactatcaaaatctttcacatttgttcatattaacgtatgtacatagggtttgtaaactgtaaattcgacaaaaagggggacaattgtatgacattttctttttatcataaatgaaaaaagtctattatattcattcaatcattaaaacacaaaaaaaccccatgcagactgcatggggcgccggttattcataccgtaacgcttcaatcggatctaagcgtgatgctttgttggcgggcagcatgccgaaaatgacaccgatcagcatactgaacagcacaccgatacaaaccacctgccaggaaacgagcgacggccagcctgcgataagggaaacgagtgatgctcccccgtagccgagacagattccgattaagccgccgattaatgtaagcacaacagattcaattaagaattgtgtcagaatctgtcctctcgtggcaccgagcgatttgcggatgccgatttctcttgtccgttccgtcactgatacgagcataatattcatgaccccgatcccgccgacaacgagagaaataccggcgatcgaaccgatgatcgtcgtcataacggtcgtgacctggccgattcccgccgctatttcttccatattcatgacttgataggcctcttttgtaccgtgattgtcatttaagagacgggccgcttcttttcctgttgatttgatttgatcagcggactccgtctgaacggaaacgttgctgtagtcgttagtaccgaaagacgttttcagcatgttgaacggcacatacatttcactgagtcctaacgataaaaagccgctctcttctttcagtacgccgattacttcaacgggctgtccgccggcccagacgatttttccgagcggagacgttttcccgaacagcttttcagccatttttttcgagatgattcctgctcttttcccggaaagaaaatcattgtccgtaaatgtccgtccatcttgaacgtccagcttttttacgtccatgtagccgctgttaatgccgttcagcgtaatatccgtgtcttcttcatggtaacgggccgtcatggattttaccgcggaagcgacaacctgctttacgccgtccactccttttaatccattaatatcttcttctgtaaaactcgcttgctgtaaggcgttcggattggctgttaattcttcatcactgggcatgtaaaacaattcaatcgtattgcccggcccgctgatggattgcttcagcatttgctctccgccctggccgacagccacaacaacaattactgaaccgacgccgataatgattccgagcattgtcagaatcgatctcagcttgtgagctcttacggaactgagggccatccggagattttctgacaggctcattcccccactctcctctgctcagcatcgcgggaaacgatcatgccgtcacggacgaaaatcactctgtttgtacagtccgccacttcaggctcatgagtcacaagcaccacggtcacgccctctgcattaagctctgtgaactgctccataatggaaatgcttgttttcgtatccagcgcgccggtcggttcatcagctaaaatgagcttcggttcgttcacaatggctcttgcaatcgcgacacgctgcttctggccgccggacagctcattcggcatgtgacgcatccgatccgccaaaccgactttttccagcgcatgctcagcccgttcctcacgctcttttttgccgataccggcgtagatcatggggagttcgacattttttcttgcattcaatcgcggcagcagctgaaattgctgaaagacaaatccgattgatttgttccggaccgccgcaagctctttttcggtgcatgaagaaacatcttcgcccgcaagcctgtaactgccggacgtcggtctgtccagacagccgatgatattcatgatcgtagattttcccgatcccgacggtcccataattgacacatattctccttcttcaatcgtcaagtcgattgaacggagaacatcaaacgtctccttgccgatctgatagctttttttcacctttgaaagctgaatcatctatgctttcacatccgttccgtcagtcaaaccgtcagccggattcagaatgactttatcatcctttgaaagcccttcttttatctccgtaagctgatttgcggtatcgccgactttaactttcacgcgtttggccttcccgtcttttaccgtaaagacccagtgctcatctccgtcttttttgaccgcggaggacggcagcgtatcggctttccgtttgtctgtttcaatgttcataattaatttaaaccccggcttgccctccggaaggtttccgatcagcttaacctggaacggatactgcacggcctgttccgtactttcccccgaagcagcgcttgacttttgatcaggaacgagtccgacagccgccactctccctttccacgttttacctgggatggcgtctgaggtaattgtaacgctttgtccctttttcactttcagcgtgtcgtattcggacaaattgccggcaacgatcaggtgttccgggtctcctatatgtataaccggttcttgaatatccgattttttagaagccgcttcttgatttaccgagattaccgtcccgtccatctcactcttaacattgagattcgccacctgattttcaagagactgcttttgcaaatcagattgctttaattcgatttccgccgttttttgctgaagctgcagatcagtccgttcggattcaatttgttttttggcttccgcttctcccacttgttttgccagatcttgttccttgctgtttaatgctctgagtttttcttcaacttgttcgatttgcatccgttttgattgttctgtcaactcattttgttctttatcaagattgagctgctcatttgtatacgtgactaacgacgaccctttttttactttgtcgccttcttttactttcactttatcaagagttcctttatccgcttcataaaaaacatactgttctttagagaatttaagtgttcccggaaccataaccgtagaggagatttctctgttttccatggttccggtttcgatttttttcccggcgctgccgcccgcgggagcggcagacttataaatattgataccgatgaatactgcaacaattacggcgatgccgattccgatccaaatttttttcatgttatacacctgctgtcactgaacttaacagtcctccgactgccgaaactaaaagcataataacaaacaggacaatcgcggaagtccaggccgcttttttcgaaatgccgcctgtatagcgaagtcccaaagcgagcagaatatagctccagatgctgaaaatgtcgaacgcgcttaaaaagaccgcgacgccgcctccggccggtatgacactcgccaaagatgtaacggcatacaatgagcccgcaccggtaaaataagtgacaagaccgttaataactaagccgatattggtaataaatgccgtaaacaggctgagtgagagcatttttttgtaagttgttacgccgcctgaaattttaacgcacagccagtaaatgagcggaacgataaacagagcgataatgcccccgaagattcctccgaacatcgagccgaatttagcaatggttttggtcatttcaatctgatcatccgacaatccgtcaagagatgagctgttcagcacttcttcataattcatccccaatccgcgcaaaatactgccggccgcgatgagaatgatgacaatcaggagaggaatgccgatgaccggcttctcttttaatcttttaaactgcacaacaggacttgtaatgacgccgaaaattgacggcttttccgttactgccgtattgcttttttccaggtttggttccatattgctgatgcctcctatgtattattctgtttatacgtacgctttaggctgagagaagtttcaatttttttgccgtttgcgtatttatgctaaattgtaacacaaattctcagctttacgttccataattatgtaaaaaaaagcattgtcagaccggtatgacgggaggttcaaagccttgtgaaggcactgtcttcagcctattcatgcagtcaaaaccagctcaatcgcaaatccctttaaatcccatttagatattctctggaattcagcgcctatatacaaaaaagccggatggcaatgatgcacatccggctcttttttcaccctccgcttacaggagggataaaggcaatggtatcaccttctgttacgatgctgttgtcttttacatatgtttcattgattgcgatcatggcattgtcaatcgtctgaaggccgtaccgttcctttagcagcgtttttacagcagacgccgccgtctctttttcgtcaagttcaatgaccggtgttcccgcctgctccgcaagcccggcaaacaataatactttaatcatcgcgattcccctttatgcaaatccggttttccgttcggatagggcgttgtttccagctgatcgcctatccattcttctccgtcttcccagatttcttttttccatatcggcacaatctgttttatccgttcaattgcatattcattcgcctcatatgccgcctttctgtgcggagaagacacggcgattacgaccgctgcttctccgatatcaaggacgccgacacggtgagtgattgcagcttcggctccttcccatttcgcactgatttcatcgccgatttgagaaagcatttgaacagccatcggttcatacgcttcatattcgagacgcaccgtccgccgtccggcagtccactctctgaccgtgccgataaacgttgtgatggcgccggcttcacgcttttcaactttttttacgatattttccgcaatgataggttcccttgtaatttgaaaacgttccatttatgcagattcccctttcagctgcgaaagcacaaacatcatggcagccggatcgtccgcatggaaaacgggcatgcctgcatctgccggcatatgctccgtatttctgctgataaccgcgatcacgcgctccaaatgcttcagcttttgccaatcttcgctgtctttgatcataatgattttcggatgcggcgcatgtttaaatccctctatgagaagaccgtcaattcccaggcattcatacagactgatcaaacccgccagatcccatttttttcgcgccgtaagctgcaggacgccatccccttctactcccgtaaccgcggccccggcttttgaaaaacgctccgagtcttttccgtcagaaaaaggttccggttctccgccatgtccgtgatgttttaaacatccaatatcgcactctttcggcgccgctttcagcacacgttcaataaacgttgttttaccgctgttttgaaaacctacgatctggacgatcgggaaagaattgaccacggccattcacttccattctcatcacggatgaggagcgcgtgaaccgtccggcccgcttcataccccctcgttcctcccggcagaaggataaacgcgtttgcttcggccagagatgtgactgagcttgatttgtcgagaccgaccggtgacgccatcatctttccgtccttatgataaacaaatgccctcacaaatctcgtaaacggattcggtttcggaaagtcgtttgttaacacggcttccgcccatccggaatgaggtttttcattcagaagccacgtctgaatcatcggtttgacaaacagggtgaatccgacataacatgcggacggattgcctgaaaggccgaacagcagcatgtcatcggcccgggcgacagttgtcacgctccccgggcgcattgccactttgttaaaaagaacttccgctccgagcttattataaatgtctggaagaaaatcaaaatcgccgactgacacgccgccggtcgtgatcagaaaatcaacttttttcatagcttccttcaccgcatcatagctgtcatcaaaatcatcggaaattttccctaagttcagcggcaccgcgcccgcttcaatgacctgggcatacaccatcgcagcgttgctgttgcggattttccccggctcaagcggatcgctgacatgaagaagctcggttcccgttgcgataatgccgacaaccggctttctgaccacgggaacggaagcatagccgaaggttgctaaaagagcggttacgcccggcgtgattttcgtccctttttttaatagcgggctgccctttttcgcatcttctccttgatatgaaatattatcgcccgcatgaaaagggcgtttcactgacatgtaattcgtcccgttttcagaaaacgtttttgtcagctcaagcatcactacggcatccgcgccttttggaatctgcgcccccgtcataatgcggaccgcttcataagggccgagttctttttccgatacggcgccggctccgatatggtcaatgacttcaaaggtgacggcattgtcacgggaagccgtttttgaatcgctcgccctgatggcaaacccgtcatacggggaacggttaaaggccggcacatcatgatccgccttaacatcctccgccaaatagcggtggagactgtcctcaagcgccacccattcggtatccccctgttttttataccggctcacccggcggactgcttcgtccacctgaatcggcgttcttttttcaagcatagcaatatctccccttcctacagtccgatcaccctggccagaactgaatttgcttcttttatatcgtttgtaccgtgaatcaaagcccgtccgtcctgaaaaataacgattctgaagcgctcatacgccatgtgcagcagaaattcatttgcttccactttaccgatctgcttcagacgtttgacaagctcttctttatccagcctctttaaggcttccgatctgatttgaacggtgtctcttccgcacagcacgcttgctttcggcctgttttcaggctgcagatacggatatacgggctccgcgccgcaggaagggcaatgatcccgtttgatctgatccacatttatgctcatattggtgttattccacacgtcaaacgtgaaaaagcgccgatttaccgccgcatgatttcctgtcagcaatttcagcgcctcagcctgctgataagcggagacgatatgaaccgccggaggtatgatgcctgctgtatcacatgtcgctccgcccacgggcatttgctcaaacaggcaggataaacacggcgtaacccccggaataatcgtcatgcacattccctgactgctgacacaggcaccgtaaatccaaggtgttttcgttttcagcgccagatcattgatgaccattctcgtttcaaaattatctgtcgcatccacgatgcaatccgcttgttcgatcagcggttcgagcgtttccgccgtaccttccgccgcgtaagcatcgatatgtatatcactgtttaccgccaaaagacgcgccttggccgccattgctttcggcaggcgctgtctcgcgtcttcttctgtatacagctgctgtctttgtaaattgctccattccacataatcccggtcaataatcgccatacggcccgctccggctcttgccaggccctctgccgcggctgttccgagggctccggctccgacaatcaggacactgctgtcagccagcgcctgctgccctttttcccctatcggcttaaatcttgtctgccgcgaatagcgctcttccatctgtgttgtccccttgcatttttatttccatcataccatgtttcttcccgatcagtcctgatttgaagactcgacatgcgccaaaagtctggtgtaatcgtcccgtgtgttgatattagcgaactcctccggcccggcgccgatgtcttcagcctgcacataacagacagacagccgtttcaacgtgtctgtcattttcagtttgttttgtgtcagctgatcaaaaagcacatcctgcacccgtttatggtaaaccgccaagaggggctgctctctgttttcacaaaccggtatgacagcatccaggtttccggtcagcttcttttcaagcgcagccatcgtctttcttgtcacgagcggcgtgtcacaggatatgaccgtatatgtttcgccttccgtttgttccattgccgtatatatgccggcaagcgggcccattccccgaaaccgcggctcatcggcaaaaacatgccgctccctgtttgataagaacttttttatatgctcagggcggctgataatcaccgtttctccgccgccgaaggcttttttcgcctgttcataaaacatgccgcccttccactttgcaaaagctttcggttctccgaatcttcgggaagctccccccgctaatattacattcacccgtttcatgtcatctctctcccattctatataaaagcatagcaaacgcctcagccgaaatacaatattacggtgcttgtctgtttaattaagaggaatagccgttgttcctttcccatattgtagtgttaacatcatgagggagatggttcttatgaaaatatcaggtccgtttttccacgacacttctcaagagaacctttacttgaaatctgaactttccagatgcagaaaattaatttcagaatttgaagcaagctacttccatcagaaaaataataagcttcaggaggaaaacgccaatattaaagagcggcttcacaagctttctgacgaattggaagccatggctcaaaaacacaaacagacaagtgacacggaacgttctttgcatgaaatcagagccgggctgctcgataaaatcgtcattctgcaagaactgcttcagcaggaaacgtttcggcggaaaaatgagatggaagaaaagcaccgtctgcatcttacaaatgtaaaatttgaagaagaaaataaaaacttacatacccgcatccgctcacttgagaccgccattcaaactgaacggacttctcacgaagatatgaaacagcgttatcatgccgctgcagacgaaaatacccggcttcaaacacaaatgatagaaaaagaataccagctcaaacatattaaaatagaaattaatcatatgagagatcgaatactagaaacaaaagaacggcttgtagaaatagaaaaaacgaaagaaaagttatttcaagaaaccattctttcatataaacggcagctggacgaaagtgatgcttggattgccggccattttgctgatattgacagccgcacggcggaaccggcggaacaagctctggaaatcccttctgtttccaaagagactgttcaggcagaagacttgcttaaagccgttaccgaacaagtcatctccctgcaaaaacaatttgtacaatcagagtcccgcgatcagtcgtttgatgaaaaactggatgcgttgaaagaacgtgctgacggcgaaaagcctttccaaaaatatgtcgtcaagcttgaaaaaaaacctggaaaagatgcgtcacttccgcagaataagcgggaaagcgcaaaaaaactgcttgagtaacgcaagcagtttttactgttttattcagcagccgtatcatttgccgtttctgctgtttcctgagaaatttctccctcaagaatatattggccacggtatggttttttcacttccggatacattttaattaagctttgcataaatgttgtcatattaggaatttcaaggccgctttccttttcaatttccttttgcagttcggaacttttaatcgctgcattgtggcgtttcaatgttttaatcgctgcttcgcgcagttttgccgcttttgatcccggtctcgccgtccctcttcttcttcttgtagaaccgtctggaatgccggcgggaagagacgtaatagactgcatctgcggctgggaggattgaggctgtgtctgcggcttttgatagcttctcatttcctgtgctgcaagctctgcaagcaccgggagagagtcactttttttctccggacgaaactctttttttgtatcggacaggctgcctgtattgtctaattctctcagttttgcatatattttatcacgttctatttgatattcacgaatgacttttacctctgcttcgttcaattgttctaaacgtaagcgcagcgcttctctttcattaaacatgtgtaaaaccccctgtcaaaaatttaaacgcttttattaagatattagattacaaaagtaattttatcaactattattttatcattttactattttatttactctatgaaaaattgcttattttctgaaaatggtactttatatacaaaaatcccttatcatataggggattctggacaaagttccaatttattcaaccatttcaaaatataacttgaaattacttgtttaatgaaaattagcgtgatatctacaattttcgactataatatgtaaaagataatgatatcgataaaacaagcggtacagcgtgtttacggctgtttctcttattttttaagcacacatgccatattggaattttttatcaaataagcacaaaaaaaccctgttacctaaacggcaaagggtttgcagaaccgagacaatagtccgacggagattgtcccgattactcagaagcctgctccgtttctgaaagtactcggctgacacgtttttcaagcattttcatcccgcttcctcccgcttgaaaatggcggagctgtccggttttatcgaaaaggtaataagccggcacatattcattttcaaatgcttcagtcagcgtatgatcgctgtcgacgtaaatcggctgagagatatcgtgttcagccgctgttttcttgattttctcaagatcaagatcgtcttcggaacggggcatgtgaacggccaccacattcagctgatctttatatttatcacgaaattcgttcatctcaggcatcgcttctttacacatgcggcagctggcggaccagaagtgaatcagtgccggctttccgccgaccagctgttccttcgtgacttctctgttaatccatgctttagcgcctgtcaattcaggcatttgctgacgtaatttcatcttatttccctccttatgaaaaaggttttttgccggggctttcagtttcgccgggcaacgttctcctgttttccctccaaaggatatgatttggctgaatcaccatgttaaaatgagtgtggcgattccttagttcatatcttcacaaaaatgatgatattgaaaccgtgcaatatgaacaaatcataaatgaaataactggtttctattaaaaggtttatcttattttaaaaacgggtatatcacttttagctttttccgcaaaagacttgaaaggaagacatcactatgattgatttaaaacactttgactgggccgggcttctcacatctgccgggattttcatcataaagctggctctcattattttagcgtactttattttccggacggcaggaaaaaagctgatcaagcatctgtttcagaaattcgagcaacaaaacaacctctccacaggccgcgcttatactttgcgaagcctcgcgcttaatgtatatggatacatcttgattttcgtttttatcgtgatgattttggatttatttcactacaatccgagcgctctcattgccggcgccggcgtggtcggtctcgcagtcggcttcggggctcaggggcttgtcagtgacatcgtcaccggattttttatccttttggaaaaacagatcgacgtcggcgattatattacggttgccggctacagcggcattgtcgagcaggtcggtctccgtacgacgcaaatccggagctttgacggcacgcttcactatcttcccaaccggggcattacgaatgtgagcaaccattcccgcggaacgatgcaggcgcttgtcgatattaaagtgccgcttgaaaaaaatcttgatgaaaccattcaaatcctgcaaaccgcgtgtgacaaagcagccgctgagctcccgcagattaaggaagggccggacgtcatcggggttcaggatttaagcacgtcagaaatggtgatcagaatcattgccaaaacagaaaatatggagcaatggcggattgaacgcgtactgcggagagaaataaaaatcgcgctcgaccgttttaaaaacgccgcttccgccgaatagaaaaaccgaagcgtaagcttcggttttttctttttaatgaaattttttttccacttcgctgcagatttcgtcggcggtcattccggaagccgtaatgacgggagcctgagttgacgtatcggcaattccttggacattgctgtcaagtccggttacgacacagcagtcacaattcttcgcatcctcaggagtcttcatcatcactacgtcatatcctttttgttttaacgcctgttctacatccgataaagattgttcaattccaatttttttcgtcatattgaacacctccgttatgtagaatgctcaattattgttagattattcttcttttcggatttaattggcatacttcgaaaaatatccgaccatgacatttaccgcggtttccatcgcatcttcatccgggttcagcttggcgtgatgaagcccgtgggatgaatcggcccccagccagaacataaagccgggatattttttcagcatatagccgaaatcttctccggtcatcgcttctttcgccgttctcacgtcagcaagctgatgatcgctgacaaattgcataaattcttcggtcaggccgcttgtattataaacttgatgataaacggacggatacgtgacttttcctttgcatcggaagccgatttcaattcctttgacaagctcttcaatccgctttttcaccatacgcattgattcctcggaaagcgtccggatggttccctccagatgagcatgctctgcgatgatattttgcgccgtgcccccggtaatcgttccgacagttatcacagcgctgtcaagcggatccgtatttctggatatgaccgtttgcagctgcgtgacaagcgtgctcgcggcaacgaccatgtcgtctgctgtatgcggatatgccgcatgcccgcctttcccctcaagatcgatgacaagctcgctcgtattggcaaacagcaatccgcttttggtggaaattgtacctacaggaagctcaggtgctatatggagagcggtaatcaaatccggcgtccattttttcagcacatcgctttcaagcatcggttccgctccgcccggtccttcttcagccggttggaataaaaagagcagatcatgtttgacgggatgatggacaaaatgatcaataatgccgagcgcaatggtcatgtgcatatcgtggccgcatgcgtgcataaaaccggggtgttcagatacaaacggaagccccgtctgctcttcaatcgacagagcgtctatatccgctctgtaggcgagcattttttccggagccgtgccgttgactttgacaaagatgccggttctccaagtttcgatttcaattctttcctccggatattggttcaatagattcagcaggtactgttgggttttatattcctgaaagccgatctccggaatgcggtgcagatctcttcggatggcaatgagccgctctttttccatatgtattcctccttgagataagaataaggcgtggattttatcatccacgcccattctatcaaaccattccttacagctggcgtaattcctgtttgatttctgttttgccttttgttttttcatcgatatctttgatttttttcgcaggtgttcccgctacaacggtatatggctcgacgtcatttacaacgatggctccggcagcgacaaccgcgcctttaccgattgttacgccttcaagcacaaccgcatttgcgccgatcacaacgtcgtcttccacgacaacaggcttagcgctaggcggctcaataacgcccgctaatacagaacccgctccgatgtggcagtttttgccgacagtcgcgcgtccaccgagaacaacgttcatatcaatcatcgtaccttcgccgatgactgaaccgatattaatagatgcacccatcatgataacggcattgtcgccgatttcgacttggtcgcggataatagcgccgggctcgattctcgctttaacatcttttaaatcaagcatcgggatcgcagagttgcggcggtcattttcaatgacgtaatcctcaattttgtctttgttttcttcgattacgcttttaatttcagcccactcgccaaaaacgacgccggattggccgttcaggaatgttttagcggaatcgccaaagctgattccttcaagatcgccttttacatacacttttacaggcgttgattttgtactattttgaataaatgaaataatttcatttgcatccatcattttcatatgtattgtcctcctctgattttctacctcattactgtaacaaaggaaggatacaaagacaagaaaaaaaggaacaagcctttattctgccggctggctgcacagcgcggcaaactgtcttccgaattcccggagctcttcttcctcactgccctcagggttgttttcaattttgaccgacggcagcaccacccgcccgccgcgggttttgattactttttccaattcgtcaaccgccccgcaaaaaaactcataggacgtatctccggaaccgaacaaagcaaatgtttttcccgtaaactccaggttttccatatcttcagcaatatcgagcatttcatcaggaagatccccgtctccccacgtatatgtgcctaataaaatatactcgtaatcattaaaaagttcggcatgaatatccatcgcttcatatctgtctacggatgcttgtgcttcgatcagccctttttcaattaaatccgccatcgcctcggtgtttcctgacattgtggcgtaaacaagcaatacattccccatcttcgtctctcctttatgcataaaaactaatgtgcgagccgaaccgcctcatacggtctgacaaacttactttcgtaaaggcccgcgcaaaaaaagttttcttcccggttggccacccgccatccgtgaccgcggatcgtatcaaaccactttaattcaccggcggcgagatcagcttgataaatacgcgaaaatccgttttcgtcctgtgacgatgtgacataaataatcccgttatcctcagaaacgtcgagaaatgatttttcccgtacggcgggtccggctgtaatggcaaactcctcttgcgtccgcacgtttcggacggcaacctccccccgttctccctttgccgcgccctttgctgcaatgagccagtcattctgatacatcatcattgaagccgtcatgcgctgcctttcgcggcttatacgccggatgcgttcttccgtcagatcatacgcccaaatgccgccatgattcatatgaatccgggtgccgatataaatcgtctgaccgtgtaaacaaagcgaacggatgacaggcggctcctttaattgtgaaaagggcttagccacatgccaagtgacgccgaaatcatcagataagtagaggcagtatgtgccgtgcgcacagacaaacccgtcattccgcccggcaacggcccatacggaggcgctggtcggaaaacgggaggccgtccaagtctttccctgatcggctgatctgaggacggcgcctttttctccagccgcgaatatgtagggccctatgtaagtcagcacatgaattctgcttttcactcggaacaatcttttccagccttcttccgcggaaaaatgaaaaataccttcgcctttcacagccacaaaaaatcccgaagatactgatgccatgacagccgtcgcgcctttatgaaacatagcaccggtctccgtggtgtgcggcccatgcaagaaaaccgcggacaaattctttgcagcattcctgatcctcagccgtctcgggcgccagctcgattttcagcgtttccggatataaattggctccggcctgttcaaacgcatcgcaaaacagcgtgaccgcttcgcaaaacttcgggtaggcgtgatcgcctgaaccgaaacaggccgttttcagtccgttgagctggctgtgcagaatatcttcgtaaaaatcttccgcttcgtaaggaagatcaccgtccccccatgtatacgtgccgacaaaaacataatcatatgcttcgagagaatccgcatctgcttcgtccatgtcaagacagtcaactgctatctgatgcccgctcagtgtttcttttataatgccggcaatatcctctgtattccccgacatgcttgcgtatatcattaatgctttttgcatatgatcacctcgtaattgataatgattttcattaacatatataacactttaaatgataatgattttcattgtcaataaaaaataaaaaaaagacagcatgattgctgtctttctaaaatgggcgttcctgcttcagcatatctttaatgacagaaacaaaagcctgcacctgttttaattcaaatgccggctcatatccgagcagccatgtgtcacggccgatcggatggtcctttgtatcaagcaggggcattttatttactttatcttcctcttctaaggtgactgacggcagaatggcataaccgatcccgtgcagcgccatctgcttgcacgtttcaatctgatcgacaaggatggtctgtttcggcgaggttttgaatttttgatgccaccaatgctgaatttcctgaaaatatgtactgtcacttttgaattggatgaacggccggtcggtatgggcaatatcatcaatacaggaaatttccgtatcgaccaaatataaatgatcggtcattaaataatctttccggcctttccattccggatttccccggataatgccgatatgtacctgatcttcatacagacttttcagcatttcgctgctccaccctgtaatgagagagacctttgcattcggatatcgttccacatatgtttttaacactttcggaagccagtgctgcccgataatcgaagcgacggcaagctttaatgtgccgtgaatctcaccctcaagttcatcaatgttttctctgattctttcttgccgatccgtgacgtcatttgcaaattgtatgattttttctcctgccggcgttaccgtaagtcctttttgagacctaagaaagatctttgttccccaggctttttcaatggtctgcaatcgctgggacagagccggctgtgacacgaataaccgttcggcagccttcctcatgtttaattcctcagctaaaactacgagcatatgaagctcttgaagctgcatgttgtcctccttttcaatgccttttcgtatttcttatctaccattctaataaaataaaggctgccgaggcaagcgccactcatatgtatgcgttttctttttctggcatgcaaaagaacaaataggctgatcgtgcgagcctacttattcaatgatctgatatggctgctcaactgctttaatacgactcttctcgtgaaaatgccttcaaagacgccttcatcattttcaacgcagacaaagccgttgttaatgaccatgctgaaccctttgataatcggatcattgatgtggagacggggaatgtctttcagcatgacttcctcaaccgtaatttgatccagcttctcaaactcgatccgttcaagtccgaaaatgctgttcataatcatatttgtcccgatcaaaccgtgcagacggtacgaagcgtcaaggacgggaatggcggtatagccggttttcgtcagcactaatagagcatgttcaaggttgtttccgacttgaacgtgcgccactttatccgcctcgatcataaattgtccgactgttgcatcaagaagctgatctgattgtaagctaatcatgtcacttcgacccctttacatttttcatcaaagcatgtattccctatattgcaataatataaacattatcattttttgtcgaaaagtttccgtcaataaaaaagatactctttgcaatcgagtatcaatttataggccgctgattaattttcgttccgaaaacggtcatagagcgttacgagttttttataagtggttccatcaacgctttttgaccctgcttctatatcattgatttcgctggtcaaaagctcaatggcatattcttgattgatcaggatattcagcagaagtttctgttcttcttccgtaaatcgttcactgataagactcatacgtaatcaggccccctatttttaactgaatacctctgaaagcaatgtgaaatttgctttcagctctaccgctagaataagtaaacagaaaaaaatcgtcaaccgcataattcgacattttgcggattctgtatgaaatattattttgtgtaacgattggcataactgaatgctgtgcaggaatcgggcttgattttcgcttcaatgcccatcgaggtaatgcggccggtcatttcttgtatcaattcttttgtcagtcctttttgaccgatatccagatgcacttcaaatgaaagatccgccccttcatccgtaaaaggcaagagcaaatctgtcagttccataagacggtcgtcgaggatatgcgcagccatctcctggctgaacgcggtttccagcgaaattttttcgcgaaggctatgtatcggtcttgcaagatcatgatttttcaaacagccccaagctcccttgcctgtacggtgcaagtgtatagctgtaataaactttgtgaagtcgcggtaaacttgtgaatcagtccctacagacagcacgtatgctgaacgggggtctttattgacaaagcgtttcagccgctccgtcacgtcttgaaaggtcatctgtgcctcagaaagattataaaacagaaaagaatcagccatgtacggacactcctctttccagagtctacaaccaaacgaacaagcacgttcctttgcataatttaataaagctccgcttgcggaagaccggaagcttggtcagcctgaaaaatcaaatcaaattactgaaggagctcaaaaatttcaatagaaatcatgtcaatgttatcaaacggatatgtgttaggtttttcacctttttggaaaaccgtcagttcaaacgtttgatttttttcgaaatatttaacactgcaaattttttcgccgttaacttcaaaataacgctgcatcggctcgttagccgcttccgctgtttcttgcagactttgcagccgcgtgatgatacccattaattgtgacattctaaaaaaagactcctttcaaaaaacaacttcaaatcaacaagtatttattataatacaagttctacagagcatcataccataaagtagaccgggatggcattttcccgctggattttcaaaaagaaataaacgggaaaaccgtgttttcgaatagtttgaagcttttttcggaatgtcatacacctttcaaaaataatttttcgctttttgagccgccattatcagatgtatgtaaggagaagcctttttatgcgagacggcataaaaaaacttggcgggggtagcgccaagttttttcggatcttgatctgatagaggggttggggaacagagagtaacttctctctataactaaatgataatgattatcagtatcattgtcaatcgttttttaaaacttttttcaaatgaacaaaaaaagcggcatacagcagccgctttaaagtaacccgtcctgttcatataaataagagtaaggcagatcgataaataaatacatattgtcatccatcgggtatgaaaaggttctgatcatctcacctgtctcaatatcactgtacaggtcactgaaaaagccttttcttgaattccgcatcttcatgatgttttctaaaaagtacggacgccagctccagtttttctccatgtattcaggctgataaagccattcgccggactgcttgaacacatttcccgtcagctgatagccttcttcatcacacatataaattctgaagcagcagtcggtcaggttttccgccagttttttaataaactcatcgtccgcctgatgggttttctttagctcggaaactgcctgattgacccgcttataaaaattctcagagtgttcatataccgtttccagcttctttttttctctcgtaataaattgctgaaactccgttttcaagcgtgcttttaacaggctccggtctataaaatccccgctcggcgcctgcagataatagccttgaaaaaatcggcctccgtttctccatgcgtactggagctggaaatcagcttctatatcttcatacagcagcgcggcgccgatttttctcgccagcaatgaaatgctgtacagcacatgctcatatgatggtgacggctgagataccttcagcgcctgcaaatctattttcagaaggtccggtgaaaggagcgcgattctgtccaggttgctgctctccttacctatattgtccaccgcgattttaatgccgtatgtacgatagtaggcaagcatatggtacagctgttcaatgtcgccttcgaaattgtgctcggtgatctcaagcacaatacggttcaattcaatgccctgctcttcgtattctttcaaaagctcaagaaagctttcgccgtggtcaagcatcaatacattcgcatcctgattgataaaaatcaacagatcacggtcagcttctttaaaccgctccagcgcctgcctgatgactctgtcatcgacctcaagcttatattcttccggaatgccggaatctaagaaaaacggcccgaggctctcaatctccgcatctgccaaaatccgcccaagcacttcgtagcctacgactctttgttcctcagcgttaaaaatcgcttggtaatacggaatgacatcatcaatattcgtcagtatatcaagtgggtccaacatgttatcacctgcttctctatctttgtctgattatacacaattatatcagcaccacaaatgtttagattaggggaaaaggaggcagtatggccgcagcttaaaataaaagggggacatttttaagatcactcttcagaccggttaattaaggacgttattcatttgtttcacaatcacaaataaaaggataaatataagagcattataaccggcagctgtccaaaaataatggctccaatcagtgctgttaaatatccaatcatcatcatgtttcaactgaaagaaagttccttttttatctaaagtgccaaatgtaagagttgttaacccgccaacactctcggaaacgtcaactccatacattgaaccggcagtatcagtatgatttattggcatatacgtgtaatcagataaaattgtttccgccagcttggctggcagagacacatataatacagccgatgtatcgcctccgagcccactcaaatactccctggctttaataaatttcgtttcatcaggaaaatcgatgtgatatagcttttcaaatctgattatttcatcagatgtaagattggtattttgataatactccggagtaaaagcacaaataataaagtaccaaatattaaagatgataacgaaactgcttacaaatagtacaacgaaccattttaataatttcttcaattaatcgccccttaatctttcaaaattatatcataattttgaatagaaaataaaacaagcgaacggcggctttaacgttcgcttgttttgcaaaataatcaatatatgaaaaattaaaacggataaggattcagccattgacccccgtccattgtgatacaatccccgtttatataggacgcttcatcagatagcaaaaacgctgccaacgcggcgatttcttccggtgtgcccagccggccgagcggcacactgttcatagtgcgggacaccgctttttccgattcaaacagcttctccgcaccgcctgtccgttcaatcgggccgggggctatcgcgtttgtgcggatgccgtatttgctcccccattcaacggccagcgttcttgtcagtgacaatacccccgctttggctgcagcggaatgaacgacacccgctcccgctccccatgcgtatgtagcggccatatttaagatgacgcccttctgctcctgctcgatccaatgccttgccgctgcttggctgcagaaaaatgtgccgtttaaaacaatctcaataacagctttccatccattgggcgtcagcttctctgccgggcaaataaagttgccggccgcattgttaatcagcgcatcgagccggccaaagacttttttcgcttctgtcatcatgtctgaagcggcggaatcagaacggacatccatttgaaaacaggcgacctgcccctcaaaggtctcaatttctttttttgtttcctcaagtgcttcatggttcctccctgtcaccatgacgtgccatcctaattcagcctgttttttcgccattgcttttcccatgccgcttgatccgcctgtaatgattaccgctttcttatccataacaaacccaccccttattattgaatgaataatcattcataattttatcacagatgtctttccgcgtcattacatgctgagaagggatttttcagccaagctgatgatataatagaacaactctgacaaaggttggttttacatatggagaaaatgaccagaagaacatttttaaaaagaggattcggcattttgggtacagctctcgcaatggcttgcggaggttacggctatgcccggtatattgaaccgcgcatgattgagatcacccggcatacaatcaccagccgcctgatcccccgcggttttgacaattttaaaatcgttcaattcagcgatacgcatctcagtgatgtgtttacatccggtgacttgaataaagcagcggaaaagatcaatcagctgaaacccgatctgctcatctttacgggagatttaattgataagccgcatttatttaatgatcaccagcatgcactcgccgtgctgcaaaatcttgaagctcccttcggcaaactttgtgtttacggaaaccatgaccacggaggctacggtacgaacacgtacaaggctctgatggaagcggctgattttcaagtgcttcgaaacggctaccgtcaggtgcagctgacagatggaagccggattgaattcgcgtttttggatgatgtaatgctcggaaaacccgattatgaaggcaccctgtcacgcctttccgaagatgcgttttccattttaatcgtccacgagcctgatgccgctctcaagataggcggatatcccgtaaacctccagctgtcgggacacactcacggcggccaggtccagctcccgtttttcggccctcttattacgcctccttacggaaaaacgtataccgacggcatgtatacgctgcatgacacaggcgtttacgtcaatcgcgggctcggtacgacaagactgccgtatcgatttttagccagaccggaaatcacgctgttcacattgaaaaccgagcaaaaataagacttttatcctgatgcacagacaccccctccgtaatatgtatatggaaaagagcaaaaaggagggtgatgaaactgctgacatatcaagtgaaacaaggagaaaccatctcaagcattgcgcaagacttcagaataagcactgctgctctccttcaggcaaatccctcaatccaatcggtcatatacgcgggacagcatattatcataccgaatcttcccgacccatccaccattccctactccatcatcgtgtatatcggagcgaagaaactggagttataccgccttggcaggctcatccgtacgtatcccatcgcagtcggaaaaatattgacgaccacgccgaccggagaattttacatcgtgaaccgccagcctaagcccggcggcccgttcggcgcttattggctcagcctctctaaaattcattacggcattcacggaacaaataatccttcctccatcggcaaagcggtatcaaaaggatgcatccggatgtataatcaggacgtcactgaacttgccgctgccgttcctaatggaacaagggtgactattataagatagaaagatcttatttgttaatggaacgagctgatgataatatattacagtgggacctttagggtaaggagcgtgtttatggatatatttaaaaatcgcaattttgtccgtctctttttcgcagcactcgcttctcaaatgggaacgactgtaggtaatatggctttcgctttttacttgctggaccatttttcaaaccagccggcatacacgactttggctgagctgatgtattcactgccgacagttttcgtatttctgattgtcggtgtcgcagctgaccggcttgataggaaaaaggtcgcagagaattgtgactggatcagagccggactgacgatcgtattgtttgccgcattatacaccgggagcatccctctcgtgttctgtattttgttcatcagaagcgccgtgaccaagttctttttcccggcggaagccagccttgtacaagctattctgcctaaggagcattacgcgaaagcggcgggacttaaccagatcctgttcagcatcttcatggtattcggtgtcggtataggcgcgtttatgtataaaacgatcggtattcacggagccattatccttgattttgtcagctttattgtatcaggctttctgatccgcgcgtgccgcattccgaaagaagcccgtcagccgaacggcccttttaaatggggagattcgtttctgaaagactcggtcgctgattttaaggaagggatcgtatatattgttaaaaacaaattgcttgcttcccttattttcggcttttttatctttggttttgtcaacggcggctttgccgtactgccgatgtttacgatgaaatacggactggcgcctgatcattacgaatcacatacttccatcttcaccgtcgcactcggcttcggcctgcttgcaggaagtgtgatcggaacgatgatcgcaaaaaaagtcaaaccgcatcatttgatgtcgattcctattttggcagccggactgctcatttttatcctcggctatacggataagctgtggatttattatgcggcggctttcgtcctcggcatgtgcatcggccctgtcaatatcgccatcggcggctggatgccgaaaatcgttcatccgaaaataatgggccgggtcagcggctggcaggatccttttatgatgtttgcccaatcgattacactcggactggtcgccctgttatttccgaaattcgttaccaatattgattacctttattacggcatgggaatcgtgattttagcggtatttgtgttctattttatcgctcttccgaaatacagcgccgaggcagcagagatcgatgtgcagcaatcattaaaggctgattctgaaaaacatgcgaaacctgtctaataaaggaaaaagatgcgcccttttcatcagaaaaaggcgtatttttataatcaatatttgcatttcaacgctaaaaaagtataatctatatatgaacttgatcaatgcaaaggagagaaataatggacgaccacgcttattcgaaagagctgcagccaaccatcgagaatctttcaaaagctgtttatactgtgaaccgccatgcaaaaaccgcccccaaccctaaatacctttatctgctgaaaaaacgggcattacaaaagcttgtgaaagaaggcaaagggaaaaaaatagggcttcacttttcaaataatcccaggtttagccaacagcagtcagacgtacttatctctatcggagactactattttcacatgcctccaacaaaagaagacttccagcatcttccgcatttaggtacgttaaatcagtcgtaccgcaatcctaaagcacaaatgtctttgacaaaagcgaaaaacgtattgcaaaaatatgtgggcttaaaggaaaaaccgcttgccgccaacaggcagcagcccgcttatcataaacccgtatttaaaaaacttggtgagagttatttttaattccgccgcaaaaaagccgatgcgtcatgcatcggcttttttctattcaatcacgtacgtatccacttttttaatgagctcgctgatttcaggcttgctgatctgttcatccgctccgacgacttcgccccggtggcgcaggtcgtccgtaatcagggacgagaaaatcataatcggcacatcagagctttgcgggttatccttaaggagcttcgtcaaacgatgcccgtccattttcggcatctcaatgtcactgataatcatgtcaatatggtctgacaggtttgctccgttatccgtcagttccacgacgtaatcatacgcttcttttccgttttcaaacgtaacgatttcactgtaccccgcctcagtcagctcatccgtcaaaagacgcatcagaagcggagaatcttcaacgatgatcagttttttacccgcccgtctttcatcaaatccttcctgatggacatgataagtctcaactccggatgccgattcaatatcataaatgatcttttcataatcaggcagaaagatcatcgtgtcttccagtttgatgattcccgttaaatgccgctccatgccctggttcaaggaagtcggcttttcaatcgcctcccaggacaccctgtggatttgtgaaacggaaccgacgtgaaagacgattttccgcttgttgaattccgttacgatatatttatcgtcttttgctccttcggcatcaacgccgaaaaaggtatacagactgatgacgggaagaatttcgcctctcagcttaatcatcccttctacgtctttatgagactgaggcacagatgtgacatctaccggctgaatgatttcccggactttcatcacatttatgccaaatgtattgacgcctacttcaaatttgacgatttctaattcgtttgtgcctgaatccaataaaatatcgtattgttgtaaagacaattcaatccctcgctatccgcattcagtattgtactgtatatatcggctgtaaacggaaaaagtgaatgtattcgatccaactggccatgaactctttataaaaagatgcttttttctgatatcccattgactttttgacatcgagtggtaaaatagtcaaggatttttcaggaagaagggtgtaataaatgggtacagtagtcatattcgaccaagatcaaatgacggtgttagaagatatcagcaaaacggcttacctgcaaatgaaaaaagaggcgaaagagcgtcccgacaagcccgctccatacatcttatggcgggaagacgtcagctttgaatacgggtattaatgacattcgccacatatcacaatagatagatcatgatacaatgaagacaatcatttcagctggttgtcttatttttttctgaaagaaggtatgttttcacatatcggacatatactcgggatagttcaataaaaagatgacaaatgctcagctagtggtaaaataggagaaactcaatatatagtataaggtgatgaattatggaacatttgcttaatccgaatgtaaaagaaattgaaatttcaggaattcgcaaattctcaaatcttgtagctcagcacgacaatgtcatttcgcttacgatcggccagccggatttcttcacgccgcaccatgtcaaagcggctgccaaaaaggcaatcgacgagaacgcaacggcatatactccgaatgcgggcggccttgagctgagacaggccgtacagctttatatgaagaaaaaagctgatttgaattatgaagctgaaactgaaatcatcgtcacaaccggggcaagccaagcgattgacgcgtctttgcggacgattttatctccgggcgatgaagttattctccccggaccgatatatccgggctacgaaccgatcatccgcatgtcgggcgccgttccggtccatgtggatacgacgacacacggatttaagctgacggcgcggctcattgaagaatcgctgacaccaaaaacaaaatgcgtcattcttccttatccgtcaaacccgaccggagtgacattgtctgaggaagagctgcaaaacatcgcagccgtcctgaagggcagaaatgtttttgtcctgtctgatgagatttacagcgaattaacctatgacagaccgcattattcgatcgcgtcttatttgagagaccagacgatcgtcatcaacggcctgtcaaaatcacacagcatgacgggctggagaatcggtttcattttcgcaccgaaagaaattgccaagcacatcttaaaagttcaccaatacagtgtgacatgcgcgtcttcaatctctcagaaagcggctcttgaagcggtgacaaacggtgttgatgatgcgcttattatgagagaacagtataaaaagcggcttgactatgtatatgaccgtcttgtttcaatggggcttgacgtcgtaaagccgtcaggcgcattttatatcttcccttccattaagtcattcggaatgtcatcgtttgattttagtatggctcttttagaggatgcaggtgtggctcttgtgcctggcagctcgttttcaaagttgggtgaagggtatgtgaggctgtcattcgcatattcactggatacattgagagaaggcttggaccggctggaagcatttattttaaaaacgagagaatccatgcagactatttaaacaacggcataacgccgttgttttttattgtttcgggaatgtaatatgaaaggccgtgcctctgtccggtttgctgtctacttggatagctccctggtggtttttaataaggttgaatgtgaccatcagccccaggccggttcctttttctttcgttgtcaaaaacggttcgcctattcgtttcagcacgttttccggtatcccgtcaccctcgtctttcaccgtcacattaacggaatactcatcttctgtcatgatgatgtgaaccgttcccccatccggcatcgactcaacggcatttttaatcagattgataaacacctgtttcagctgattttgatcaccgttaatatacatgctgtcatgttcgtaatccgttttgataaaaatccctttaagatttgcctgcgtctctaaaagagcggtcacttcacttataattttctttaagtttacacgctctttcacggcgttttgctgaggtttggcaagcattaaaagctcacttaaaattaattcgattctgctcagttcagaaaacacaatttcaaagtaatgttcgttttcccccatcgtcggcttcatgagctgtaaaaatcctttgatcgccgtcagcggattgcggatttcgtgagcgattcccgccgccagctgccctgcgatagacagcttctccgacttcagcattaattcctccgtctgcttccgctcagaaatgtcacgcagaatgacctgcacggccgtttctccgaaaaacgtcgtcggaatgcagaccatttccgtgtagatcagccggtttttaaaggtaaaccacgattgcttaataatttctgactcggtctttcggttgataatattttggatccgctgtttcacgccgtcatgatcacagggatgaagctgatcatagacgtttttcccgattaaatcttcatatgtttcagcctcaaacagcgaaatgcccgactcattcatgaatacccatttatcattgtgaatcacggcgatcgtatcaattgaattctgaatgaggagctgataacgctctctgcttttttgcagaatcgtttggaattttttccgtgaagaaatatcaatcagaagcagcaattccgcccgctgatttttatatgtcgtcggtgccgcctttacttctaaatgaacgggcgtgccgtcgagtcttctccacgtctgttcgatcattccgacttccattcctttttgcatccgcacaattcggtttttcacaatgtcgtgatactcttcttcaataaactcataagagcgcctgccgattacctcgtctttgctttcggctcccagcatggcaagcatcgcgttgttggcgtaggcgattgtgccgttgatgctgacatataaaggattcggcagcatttcgacaagacgctcgaattcgccgtttccagccgcatcttccgactgttgttctgccttttgcttcttttgttcatacatataaggccggcggggcgtcttctcctcaagcaccttgattttgaggatgatttcccgatccgtcccctccatttgcggtgtgacaatttccacacccgcttcaagccatacgatggtatgatcttttttaataagacgaaaggtgcaaggcatcaaatgatgctcattatagaagtaactttcaaccaaaaattgatcttcttcatgcaggaacgttttgagaaatgacccgatcatctcttcctgagaataactgaagtacgatttgcagtttgcagaaatatacataatacgcccgttagacgtcaaaacggcatgaagatcggttttcgattgaaactgtttgacatgctgagtatcctgttccacagaatccctcctttgcattatactcgcactgcaggctggacacggactgatataaaaagaaattccactagattgattcgctaaaaaatgagcattctccttctattcttattgtgaacgtcaattttcctgaatgaaagaaagggcgcacgagatgttcggccgccctttcatgtgttattttttattgtatttcttttcaagctctttgtaagcgtcaactgctcccttggcaatgtttttgcttacatgatctttatcatttcgaacagacggaacgacgacgctgaatgccactcttggatgttctgacggataatagccgacaaaggtcaggttatacgtgtacttcccccaccagtttttgttcgtgccgtaatagtgcgtctccgcggttcccgtttttccggaaacatcagcgccggaaccttggaatgttgaataagccgttccttgaggtgagcttgtgaccaatttcattcctttatgaacctgatcaaaatcgctcggactgttatttactttgttcaaaattttaatatctcgctgttcaatcgcttttccaatcttatttttgctgtccggttcatgaatgcttgtgacgatccgcggctggacgcgatacccgccgtttgcgatggctgaaatatattgagccatttgaagcggcgtatatgtatcaaattgtccgatcgcaaagtcaagcagcaatcccccgaccatttgcggatttgactgcatgcccgctgattcctgcggaagatcaatcccggtcttcacacccaggccgaattgggcgtagtagttgcgcattttcttaatatcgtctaatccggcaggcagcgtgccgtgcgggacataggtaatgcccgcgatattcatggccacatgaaacatatacacgtttgaacttctttgcagcgcggtcagctcagtaatggctcccatttgtgtccacgattgttttctcgttttgcctttaaatacaagcggtgcatcgacaaacgttttataatgcgggaggccgctttggtaacccgcgagaacagtcgctcctttaacagaagagcccatctcatattgggtcgtaaatgctccgatcgcaaaatcctgtgttttatttgtttcgagatcgatgcgtttccccgccattgagagaatatccccgttgttcgggtccatcatgacggcaaatcctctgtcaaccataaagttgcctgcggcgcggcttcttctcagctctttttcaatgactttttcgactttcgactgtaattccatatcgagcgagagctgaagatcgtagcctctgctgccttcatcgacgggcttttggctgacgacctcacctttgctgttttccacatactctactttttctttatgcgcgtttaaatagtcttcatattgatattcgatgtagctttttcccactcggtcattcagtgaatagcctcttgtgacatagtaatctttccgttcgcccaacaatccctgttccggtgtcgtcacaccgccgaacagagagtaaagcgttttgtcatacggatatttacgcgtccagtcattgatcacgtcaatgccggggagctctttcaggtgctcggatacgacggaaacttcttcatatgtcaggtcgctttttggtttttgcttgttgttttcatgctcgtcaagcagtgaaccgctgtttccgtttccgttcagcttattcgggtccattgatttgacgacttgcggctgataggcgttgccgcttgaaaaacgcgtataaatcgccgcgatttccagctcttttttattttgtttgatcgcatcaatctcctgcttcgggacgcgttcaatctggcgtttgtatacttcttgggatttcaggctgttttctgaatccttcataagcttttccgccttcttcggatgtgcggcaagccagtaatcaatgatatttcgatccttcataaattcagtatcaatatgaatcagtgcggcgagattttttgccgttttcaatttgtcctttgccgaggtttttgaggtagaaacgtatacaatttcaggcacagcctggttatcaaccgccactctgttccgcttgtcatacatctttccccgcggtgtcggataataggcggtttttgcatttgccttctccgcatcctggcggtgtttatccccttcgacaatctggacgatgccgagtttaaaaatcagtgccgtaaagagaaggaaaacaactaaaaaatagagattcattctcagcgctctgtaacgtttcgtttttttctttggttcacgcgcaacttcagccactttctgttacacctctcaaatcattgaatatatttacataaacagattttaattgtaacatttttgtaaaagttgttacagcgaaaacgggtaaaaaaaactgtcaagatcaaattatcttaaaatatatctaacacttcaaataatttgaagagatgtaacggattttaaaaaataaatacagatcgtttttcccggtatagagccatttttctgcgctcaattacaattatgacaaacgtttgttgtcaaaggaaatggctgcctgcattatgacaaaaaagctgtgataagatttttcatgtagaaaaaaacaacttctctgggaggctataaacttatgaaaaaagcatttctcttatctgccgccgcggcagtcagtttgattacattcggaggcattcagcaggcatctgccaaagagctgtcatgccagcacgtcgttaccgtgaaaaaaggaaacaccgtacagcatctgactcttcaagaggctattgaaaaactacatatgaaaacgagcgtgaaaaagctgaacgttaaaaatgagaaagaactgaaacagcagctgcaaaaacacgcaaagaattctgatatgacagttaaagacgttcaaaaagaaacaccggcaaaaacggcaccggcagctgccgaaaaaccgaaagccgatcaaaaccagcaaaaccaggctgctgacaatgcaaagcagacaaataacacaaacaacagcagcgagaaaactccttcttctgtcagtgcgtacgaaaagaaagtcgttgaattgacaaatgcagagagacaaaagcaaggcttaaaacctctgcagattgatgataaactaagcaaatcagctcacgcaaaatcacaagatatgaaagacaaaaactatttcgatcaccaaagccctacttacggctcacctttcgatatgatgaaatctttcggaatcacttataaaaccgccggtgaaaatatcgccaaaggccagccgactcctgaagccgttgtcaaagcttggatgaacagtgaaggccacagaaagaacatcatgaatcctgagttcactcaaatcggtgtcggttacgtagaatcaggaaacatctggacacagcaattcatcggaaaataatataaaaaagattgccccggcgggcaatcttttttatttcacccaaagcttataaatactttgagttccgctgttttcttcaccttgcgcggaaagcttgtcgtataatgatttggcgagcgccaatccgggcatctcttctcccatcagttccgcttcttcaagggcgattcccatgtctttaataaagtgtttcacgtagaatcctggtgcaaaatcgcctttcagcatacggggagcgaggttggacaatgaccagcttccggcagctccggttgtaatgcttttcagcacttgttccgggttcagaccggatttttcagcgtaagccatcgcttcagccactccgaccattcccgctgcaatcgcgatctgattgcacattttcgtatgctggccgctgccggccggcccttgatactgaatgttttcccccataacggagaaaagcggcaggcatgcttcaaacgcttctttttctcctccggccataatggcaagcgttccgttcctggcgccgatgtctccgccggaaacgggtgcatccaaggcgtgaatggacttttctttggcctgctccgcaatctttttcgccagagacggttttgatgtcgtcatatcaatgacaaacgtcccttcttttgcgtgccggagaatgccgttttcgccgagatagatttcctcgacatcactcggatagccgaccatggtaataatgatgtctgctttctctgaaaggtctttgaccgtctcctgccagaccgctcccttattcagaatctcttccgctttttgtttcgtccgcgtgtagactaaaacaggatagcccgcttctaaaatgtgcgatgccatactgtttcccatgacgcctaaaccgataaatccgaccgttttgttcactgcgctttcctcccatgatgcgattcataatatcattctttcatgtctatattaccatattataggctgatagagaccgcgttacaaggtgaatttagaaatcgcgctgatcagatcttcgctcgcgctctttaacatgtcagtcgattgcttcactttttcaagcgtaacgagctgttcatcagtagaagcattcacttcttccgcggctgccgcagattcttgagaaatggcggagatgctttgaattgcttcttgaattccggcttgttcttcactcattttttgaatgtcattgtaaatatgatctataccttgaacgagagactgcatttccgtcgtaatcagattgaggacctcacccgtttcatgaatggcgctgttttgttcatcattcattctgcttgcctcaatcatcgcgtgtgacgcttcttttgtctcagattgaatcagacggaccgtctcactgatatggccggaagaaagagctgattgttcagcaagcttgcggacttcttcagcgacgacggcaaagccccggccgctttctcccgctcttgcggcttcaatgctcgcattcagcgccaagaggttcgtctggtctgaaatggcggatattgccgtcacgacttcttctatgtttttcgtttgttcttccaggtcattcagcattgcctctacttttttcgtttctgaattggcttcgtttgacttcatcagcagctgcccgagcgcgtccaatcctttgtagctggcatcctctgaagattttgagagttgttttatgctgcccgcgcgatctgcgattccttttattttgaccgagagattttctgatttttcattgatcgtctcaacctctgacgcttgctctgtcgctccggcggcgacttcctctatcgcttttgcgatttgtccgctcgtttcatttgtttcttgtgaaatgacggttagctggtcagatgtatcagacacattttctgaggaggccttaacctgttcgaccatctctttcatattttcaaccatttggttaaagtcttttgttaactcgcctacttcatcttttgatttcgtctgggcgcggacggttaaatctccagctgagactgaatttgttttggcgatcagctgctgaatcggcccggttatcgtttttgctaggaaatagctgagtccgatcgtaatcacaagggcgatcagtgacataaaaatgctcaccgtgttcattttatcggctactcccatcagctgatctttttcaaactgcgttccgactttccaccctgtttcttttaccgtttggtagacgaccatgttcccctgcagctctttgacgccttctttatccgtggtgatgtcttttaacgtctgatcttccgaaatattttttccctgtttttccggatgcgccagaagagagccgttttcatccgccaaaaacgcaaatcctttatacggtaccttttgctcgttgaccatgctctgaatggaggacagcttcagatctaagctcgccactccgacgacggttccgctgttttgaatggcttttgacgccgtcacgatcatgtctcccgtcactgcatctttataagggtcagtccagacaaccttatcgggtttttcagccgccatcttataccacgttctatttgtcggatcatagtctttggcaaaatcggcctttggatatgtaaacatttgtttgtttgcggttccgacgtacgcaagcgcgacatatttgtcattctgtccgatctgttttaactcatcgttaaaaagccgcgcggtttctttgttcccatctgatagaaaagaccgggacaattcaccgcctgctaatctcaataatacggtctcatcatttttcagctgaagctcaatgttctgaccgagtgaattggtgacattctctgtcgtacgttttgcttcctccgtcatcatcggctttaatgtcaaatatgaagaaaccgttaaaaaaacaaccgttacgataagcattgccgatacaaacacagcaattttgatatgcatttttttaaacataaccatcccctcctgagagttatatcggtctttcggccatgaaaatgaataaaccttgaaataaatatcaaaaatttccgccatttggcgcagcaaaaaaagagccgtcatgccgacagctccgccttacgtaaaatattcgattttcgctttcggaaaataggtttcgatataagattccagtgtttcccttaaagcatgctcttcgtctttttggtatatatacttgccgattccgtagcgtccccatttgtatctgcgcttttcttcatcaagctcaagctttgttttcggatagttcttctcaatcacccgtttggctggttttgtaaaacggtgctggatcagttcaaatgtgatgtcatgccgaacgtcttcatcaagcgccgcatccagtttctcaaacagttccttatagccttcctcccagccatcgtgaatataaatcggcgccacgatgaaaccgagcggatagcccgctttagcgactttcacggcggcttctatccgtttgtcgagcggagaagttcccggttcaaagtttttaatgacataatccgcattgatgctgaatctgaacctagtctttccgttatgttttgcatcaagcaaatgatcgacgtggtgaaatttagtcacgaatctgagctgtcccaattcgctttgtccgaaatgttcaatggctctttttaatgtatgtgtcagatgatcgattcctacgatatcagacgtacaagaggcttcaaatcttgtaaattccggcgcccgttctttcatatactcatcagcctgatccagaatctcttccacattgacatatgtccggatgtagggctttgaccccatcgtcgtctgcaggtagcaatagtggcaatgccccatacagcccgtcgcaaatggaatggcatattcggcggacggctttgaagaatcgaatttcagtgttttccggacgccgattaccaatgttgatttcgcgttccggtattgctgcaagtgatttttccctggaatattccggacttgattatgcgatgtcgtttctctgatctcaagccccatgttttcaaacttattcttcagctcttgtcctaacgggtattcgagcgctctcggttcaatataaacaagctggggcacaaacggcttcagcatagacagacactccctttacatattctcatgttgttactttccgtttaaaagagagtgaatatgcgttgtaaacatttcctttgatcaatgataccggtcttcttcaaaaagctcgctgtaaagcgcttccgcttcctcatatgtcgaaaagaccgcgtcatcttcggccagcggatgataggtttcgtataaaaacagagacaactctccctcatgatacgggtgatggacgatctccgcctctttaatatgggcaacattggcggcatgcggattgcggtaaatcacatagaccgtatcccccgctgcaaatgattttgtcatgataatccctcctgttgaaagttattgttccccccttttttccgaatatgacaaaaaccagacggcttacaccgtctggcttttgtattacttattgaatgtttctttaacgaatgcgacaacctcttctgtcgtgctcatagacaagattgtttctttgaatgattcagcttcttttttagaaagcttgctgatctgcgttcttgccggaaggatggatgtagcgctcatcgagaactcatctaagcctaagccgagaagaatcggaatcgcaatttcgtctcccgccatttctccgcacatgccgacccatttgccctctttgtgagcggcttcaataacaagggtgatcagacggagaatcgccggattgtatggctgatacagataagctacgcgctcgttcatgcggtcagcagccatcgtgtattggatcaagtcatttgttccgatactgaagaagtcaacttctgcggcaaactgatctgcgataacggctgtagacggaatctctaccatcataccgacttcaatatcgtcagaaaccgctacgccggcttcgacgagtttttctttttcttcgagaagaatcgctttcgcctgtttaaactcgtttactgtcgcaatcatcgggaacatgatttttaagtttccgtatgtacttgcacgaagcagcgcacgaagctgagttctgaagatttcttgctcttcaaggcaaaggcggatggctctgtagcctaagaacgggttcatttctttaggtagctgcaggtaaggaagctctttgtcgccgccgatatccaatgtccgcacgacaactgattttccttccatacgctcaagaaccgttttataagcgtcaaactgctcgtcttccgtcggaagctggtcgcgtcccatgtaaaggaattccgtacggtaaagccctacagcttctcctccgttttcaagaacgccttttacatcgtccggtgtgccgatatttgcggcaagctctacatgatggccgtctttagaaacagtcggttcattgacgagcttcgcccactcagctttttgcgccaggtaagcactgtgcttttcttcatatttctttaacgtttcactggaaggatcgatgatcacatcaccatcgatgccgtctacgattaccgtaacaccgttttcaattgtccctgtagccgcttttgtgccgacgacagccggaatttcaagcgaacgggccatgatcgcggagtgtgaagtgcgtccgccgatatcagttgtaaaaccttttacaaactgacggtttaattgcgccgtatcagacggtgtcaaatcttcagccacgataacaacctcttctgagatcatgctcgggttcggaatttccacgcccagcaggtgccctgtcacacgttttgttacgtcacggatatccgccgcacgctctttcatgtattcgttatccattgattcaaacatagtaacgaacatggaagctgtttctttcaaagcgaattcagcattgactgaatctgtgctgattttctcctttaccgggttcaacagctcaggatcactcagaactaaaaggtgcgcggagaaaatgtcagctttgtcttgtcccagttcttttaaagcatgctctttaattttttcaagctcttctttagaacgtacaatcgcttcatcaaaacggcttacttcagccgcagcatcagcaatgtttttcttttcaaccgttaagtccggctcttcaagccggtatgctttcgcaatcgcaattccggctgaagcgcctattccttttaattcttgcattactcgccgagtccttcgcttttcattgtttcttctaaagcgttaagagcatcgttttcgtcagcgcctgaagcggaaattgtgatttcagcgcctttagcaatacctagagacataacgcccatgattgacttaaggtttactgttttgccgttatattctaagtttacgtcagcatcgtatttgcttgcagtctgtacaagaactgtcgcaggacgagcgtggattccggaatctgctgttactttaaatgttttttgtgccatgattatcattctcctttaaattaaagctattttactacacaatattatatcatacagccgtacttgtcatctgacaagcacggcgtatttatatgcttattttccgattttcacaatatctttttgttcccgttttacggtaccttcggccgaaagggaaatcgcttcaccctcggcaagatttgtaaagacaatcggtgtcattaatgaaggaacatgaggtttaaccgcttcaagatcaacttcaagcagcttttgtcccggttcaacccggtcaccctcagaaacaaaagaagtgaatccttcgcctttcaggctgactgtgtcgattccgaaatgaatcaggatctctcttccgccgtcagactgaaggccgatcgcatgttttgtcgggaaaacattcagcacttttccgcggacaggcgatacgacgattccttcttcaggaagaatcgcaaaaccgtcacccatcatttttcctgagaacacctggtcaggcacatcggtaatcggatggatttcgccggtgatcggagaagcgaacacttcttcaccctgctcgtttcggagcggatctgcgataacctcttcaacctgctggctgacttcttcttgcgcggatactttcggttcagggcgcggcgtgcgtccggcgataatatcctgcatctgtgtttttaaaccgtcagaacgcgggccgaaaatggcctgaatgttgtttccgacttcaagaacgcctgaggcgccaagctgtttcaaacgagtcttatccactttcttctggtcgttgaccgtaacgcggagtctcgtgatacaagcgtcaaggtgcttaatgttttcctgatcacccattgcctgcaggatttcataaggaaggtcgccggcttcgcctgaggcgcccgcaccttcatccgcagcctcttcttcacggcccggcgttttcagattgaactttctgatagcaaaccggaaaccgaagtagtaaatgacggctaatcctaagccgaccggaatgacaagccaccaagccgtccggttaggcagaattccgaacaggaagtagtcaatcagaccgcctgagaaggtcataccgatttttacatgcagcagctgcataaccataaaggaaagtcccgcgaatacgcagtgaatcgcaaacaggataggagccacaaacaagaatgagaattcaagcggctcggtaattcccgttaagaaacttgtcagagcggcagaacccatgattccggctacaagttttttcttttcaggcttcgcttcatgatagattgcaagcgctgccgccggaagaccgaacatcataaacggatatttccccgtcataaatgttcccgccgtcagctgtacgccgtctttgatctgagccataaaaatccgctgatctccgcggatgatgtctccggccgcatctttatagctgaaaaattcataccagaacggcgagtagaaaatgtgatgaagaccgaacggaatcaatgaccgctcaatcatcccgaaaataaaggccgccaaggttggattcgcttccacaagacccgtggagaaggaattcagaccgtgctggatcggaggccagatcactaacataataagaccgagaattaatgcggaaatcgatgtgataatcgggacgaaccgcttacccgcaaagaatcccaggtactgcggaagttcaattttataaaacttgttaaacaataacgcggccagaaccccgacgataataccgccgaacacgcccgtcgccaaagtgggtatccccagcatgttaatataggccggatggttttccgcaaaaaactttgcccgttcaattttgtcagacggaatactgccgtttgccataagcacggcgctcatggatacgttcatgaccaagtatccgataatagccgcgattccggcaacaccgtctccgttggcaagaccgatcgcaacccctactgcaaaaagaagcggcaggttgtcaaatacgatttggccggcgctttccatgacattcgccacaagctgaacgttatcattgcttaagaagtgcatgacttgaatcatatctttgttctgcatggcattccctaacgcaagcaagatccccgcagccggtaaaatcgcaaccggaagcataagagcacggccgattttctggagaacgccgaataatgctttaaacataaaagatgtacctcctctgttagctagtgtgaccttacagcgaaaattcatgacaacgaattcactggcgcaagtcttcagtttaaccgtttacatttgcccttttacacaacaaaaaaggcatgagtaaaaagggtgtgcaaaataacgggaccgttcttcccgttttttaccctcaatcactcatgcctgatcgaatcagtgacacgtttttaaggtttcaactgaaattatgaaattttattggttaatcggtacaaatgaagcgtgagataaaccgcttccgcctcatgaactggctttttcagtatttgctgcaagatttttatcagtttccaagcagtattgtagcatagcgggtattcatttttcaataataacattaacttttctggttcttttgtctgctcttcccgattaatcctgtctatggtaaatctgatatgccggatcagccgcaaatagtggacgctttctttattcactttcatctggaaagattcctcaatcacctgaacgagccgggacatcagctgtgaatgctgattgacctctgaaaggggccgattcgtcagggcggagtggatatgcagagcgataaagccgatctccccttccggaaggcagattcccgtcttttcattaatcatgccgacgacttcacgggcaatttggaattcttccggataaagcgtttcggtttccatgagaaacgggtttttaatgtcaaaaccctgctgcagccgctttaccgcaaatgcgatatggtcagtcagcgcaatatggatatgctcatttaacggttggcttgtccgcttcttgatatgataaatgacgtcattggagatgtcgacaagtgtctcgtccacataaccgaggagctttttaaattgtttttgttctttttcatcctttaagatgaacatcttgtcataccctttatcttcaatgacatccgcttgtttttttccaaagccgatcccttttccgattaagacgacctcactgtatctatcatgtgttgcgatgagcacattgttatttaataccttttcaactgtaaaggaccccttcatgatcctcagctcctttgtcattcaatacctcatatcgtacaaaacgaacggaaagcgcgtcaattctttttttagacggttgatcgttcaataaggcggtaatcaagaactttccttgccggaggcccgccgctgatcctgttctcaagcatgtgaaaagcctgctttcccatttcttttgtttgtatatctattgtggaaatacctaacatcttgctgatatcatgattgtcgatgctcaaaatcgcaagctcttccgggatgcgcgtcccgtttgccttggcttcaaggtaaagacctgcggatacttgatcattcgccgcaaacagcgcagtcggtctgtcatcccagctcttccatctatgaaaaagggctttcccgtcaagcagcgtcagcgccttttccacaaccagctcttccctgtaaggctgcccgaccttcttgagcgcttctttgtatgcggcaatgcgtacttgactgttttttcccttttttctggccaggctgatcgctattttccggtgtcccttttctatcagataatccagaccgtgccgaaatgcttcccgatgcggattactgatggaggaaagccctgccgcatcagtgtactggcagagaatgagcggttctttcacggtaagcagatgttcatcaggaattgctttggagcagataatcaggccgtccacttggcgctcctgtaactgtgataaggcaaaacgttctttttgctgctgataatctgtctggtataaagaaagatgcacgcctgacgcttcggcagcctcggcaatacctgcaacaaggtccgcaaaatacggaagattcactgacggaagcacaacgccgatcatatcggaaaaacctttggataaatgtacagcatgaatgttgcgcgaatatccgagcgattgcatcgcttttttcactctttctcttttgtccttacttacataaggatgatcgtttaatactcttgatactgttgtaacggaaaccccggcagcgccggcaatgtctctgatcgtagccattgcgtcccccctttcttttttcccttgatctggaatgcgtttcatacagtaagctagaaacagaaacagcctattcgtttgaaaggagaagaacagcgatggggattctttgcttaatcggtttgtgtctcgccatactcggcggcagttaccttgccatgcggcccctgaatgaaaagcatgacatcaaaccatttcagcattttgatgattttttcatttaaaaggtgataaaaaaggacgctgcgttccagaaccgtccttttttatcacaaagctttctatttcagaatcgttaattctttcgggtactgcgttaatgcttcggcgccgtcttttgtgacgaacacatcgtcttcaatgcgcacgccgccgacatccggcacgtaaatccccggttctatcgtgtataccatgccttctttgaggagtgtgtcgttcgcgctgctcattgatggatattcgtgaaccgaaatcccgagtccgtggccgaggcggtgcgggaaatagtctccgtatccggctttttcaataatgccgcgggcttttaaatcaagatcgccgattctgacgccgggtttgcttaattgaagcgccgcctgttcagctttaagcaccgtttcgtaaatctcttcctgtttcgggctgattgattggtatgcgaatgttctcgtaatgtctgaacagtagccgtcaagaataacgcccagatcaaacagaacgaaatcgccttttttcaaccggtctgcacccggatttccatggggctgtcctgatttttccccgaacagcaccatcgttgaaaatgacatgccctgcacaccttttttcttcagctcaaactcaatctgcgcgagtacttcggtttcactcacaccctctttaagcgccgcgacaccgacttcaactccgtaatccgcgagttttgccgcttccctgagaatgctgatttccttctcatctttcacgagacggaattggttgagcgtttcttctgccgaaacaaatgccgcgccccctgaagcttgtttgagctgttctgagcgggaaagagagatcgaatccttttcaaccgcgatggaatcaagccgcacatttcgttttgtgagctcggctttgatcagctcccacggatcttcgtgatcgccgtagccgataatatcatgctcccacccggcgctgcgggcttgtccggcttccattcccggacaaacgaaaaacggctcctgttcctgaaacaggaacaaccccattaaccgctcatgcggatccgtgtaaaaatcagttaaataaaatacgttttcctttgtatgtataaacgccgcatcatgtccttcttttttcagccaagatgaaacacgttctaatctgttcattttttgcttttcctccttaccaaagtgactctttattcattctatcagttttccggcgtttatgctgtgaacgaacattaaaaaaacagccgcccgtgtgcggctgtcatgtttattttaataatctcagtccgttcagaatgaccagaatcgtgctcccctcatgcccgatcacgccaaacggcagttccatcacctgaagaaagttggcgcagatcaaaaggcagatgaccgagagcgagaaaacaatattctgcttaataatccggttcattttccttgagagtctgcacattttcacaagcttgtgaagatcatttttcataaggactaagtcagccgtttcaagggccacgtccgttcccccgcccatcgcaataccgacgtcagcggttttcagagcgggcgcgtcattaatgccgtcccccaccatggcgattgtgccgtacgtttccttcagcttcttcacttcttttgccttttggtccggcagacaatcggcaacaaccgtcgtcatgcccgcctcttttgcaatggcagccgcagtttcagactgatcgccggtgagcatggctgttttaatgcccagtgattcaagctcagccatcacggctttggcttcaggtcggatttgatcctttaaggcaaagcagcccgcaatccggtcatcttttttaacaaagaccagtgtaaaacctttatcctttaattcttttcccgatgtttgcaaaaaagcatctgccgcatcttcacctgcaaaccccgcttttccgaccatccatttgacaccttctatttcagcctgaacaccgaatccggacgtctcgtcaatcgatagatgtcctgcgggcgcggcgccccggctttcggcaaattcagctatcgcttttgcaagcgggtggcttgattgcttttccatggcatacaccgcctgcatgatctcatcttcactcacatgttccgcagcttgaaatgccgcgactgccggctgtcccttagtgaccgtgccggttttgtcaaatgcgatcatccgtacgcttcccagctgctctaaaaacacacttcctttaaccaataatccgttgcgggccccatttgagataagggaaagcgcagcgggcataatagaagcgacaagtgcgcacggggaggcgaccaccataaacaccatcgccctgtaaaaggtttcactccagctccagcctaaagcgaaatgaggaatgaataaaagcaaagccacggctaacagcacgcctttgacatagacactttcgaaccgctcaataaatgcctgagccggtgacacgctgttttgggctgattccaccagccggatgatttttctgaataaagactgttcatttgttttcgtcacacggaccgttaaggagccgtttccgtttaccgttcctgtaaacacagaatctccggctgttttttccgccggcatcgcttcacccgtaagcgccgattcatcgaggctcgtcacgccagactcaatgatcccgtctgctgctacgcgttcgcccggcttaatgacgatcatgtcaccgatcttaagttcagcagccggcacccgcttttcccgtccgtccgcaagcagtgtcgcttcctccggttccagtttcattaaagatgttaaatcacggctgcttttattcatcgtatatgtttcgagcgcgccgcttaacgaaaaaataaagataagaacagcgccttcagcccaataaccgatcagggcggagccgacagccgcaaaaatcatcagcagttccacatttaacgccttcgtctcaatggtatcctcaattccctctttcgcttttgcaaatcccccgatcaggaaggcaaggatatacaaagtgacggacaggccttttgtttcggtaaaaaaccaggccgcaagaataaggacgccggatacgagcgccgcaatgagttctgcatgctggagccacttttttccggcccgctcttcttgtatgtgctgttgtgaatgggtttgtgtcatcacttgttcattcattatgaattctcctctctaattgagaacgcaaatcatcttcaattccccgataaaagcaaaacagccgcctgacaggcagcattttcacagtgttatcgcagtgttttctttattatagcatgccggcggaagatttcaattataattgttttaatttctttttgataataattatcattagtgtttcttcagctgttcattatatgcaaaaaaggtgcgggaggaattcctcccgcacctttttatttctctgaccattcttttaattgtgaggcggtcatcggaccgacgatctttttttcgatttctcctttttcattcagcagaaatgacgtgggaatcgtcatgacatcgtattccttcataagctcgcctttcgtgtcaagaacaatcgggaaagtgagatggtgctgactgacaaagttttgaacggtatttttgtttcgctcggcattcatcaaatttaccgttacaaggcttacatcatcggactgatgctgttcataatacgtttggaactgaggcagttcttttttgcacggcggacaccacgatgtccaaaaatgcaaaatcgttttctgccctttattcggaatcgatatctcgtctccttcaatcgtcttcatcagaaacacggctggaactgcctgtttttctgatgaggcttttgcttcaggcatccagacggcggcagctatcaaaaggactgcacatacaattaggcggtttttatgcatatgatcttcctttcacgcgtttcggatagcttgcccttccttattgaaatgtatcagccttttcagctttcgatccggggcgctgttcttccgccgcccgtcaaaaacacggagacaccgaggtctttgcagatcgtcgcgtaatgtaaacttgtcagaagaatcatgccggtattcatgccgagtataatgccaagcatttgcaattccggcatagaaccgagcacatacatcatcgaaagccctacaatgctgctccatacgttatgataaaacgccgttttcacgtggccgataccgatcagacaggcctgaagcggcatcacaaacagatgaaaaagaaaaaacggccacaaaagctgcaaataatactgcgcttccggagactgaaaaaacaaatgggtcagcgggcccgcgaactgaaacatgacccagactgccggaatgccgtagccgaatgtaataaaaatcgcttgtctcagccgtttcagcacaatatcatattgggacagcgcatacgcttctgaaatgctgggaatcatgacgaccatcagcgaatgggcgataaatgcgggaaacgaaccgattgtcatcgcaacaccggcaagcatgccgtattgatcaatcgcggctgtcccggctgccccggacgccagcagcgctcctttcactaaaaagggttcaatggcgttcgtcaccgcatgaaatatacgaagtcccgttgtcgggatggatacggccaggaggcgtttccgcacgtccttgccgcgcagatgaatgtgctgatggccggaaagcgccctccgcgccaaaataaactgcgtatacaagtaaacgaacaccacgacatcgcttgcgaccagcacaaataatgaaatgagcacggccatatcaatttcaaaagagtaccattgaaaaaagataaacagacaaagcacttgaatgatttttttcatgacattcgcaaccgcgatttttcccatttgctgcacacccataaaataacctctggcgatggatgtaaaagcgacgactggaatcagcccgatgacaatccctttaataaacgggtgatacgtatcgaatacaggaatgaacggcagcgcgatgcttgcggccgcggttgaaaacgcggtaaaaacggcggtcattctgaaggcatgccggagcatgctttcatgcagcttctgattggattccgcgatgaattttgaaatggagatcggaagctccagactggcgatgacgataattaaaaaaatggtgggcagaatgctcatgtaaagtcccatcccatgctcgccaagctcccgcgccagtatcatattcacgacaaattccagacattccgcgaaaaaggcggcgatggataaaagaatgatccctttcacaaatcgattcatggtgtctctccttgtctctcgttcttccatcatcatatgagacaagttctgaaaatattttcgatttctcaaaattgaaaaaagcatagccgggatatttttgatcccgctatgcttacatcgcaaatacgtgtctgccgatccgttcgataatttttcgggaacggatccagtggtcagatgccgttttcggattgtagaaaaacaacgcgttcgtttctctgcccggatggtcaagcgcctcatttgcggcggcgatggaatccttatccggcttttgattaatgcttccgtttgctaccggttcaaatgcattcctttgatagatcacaccccgaatggtatccgggaagccgtttttttcagtgcggttcagcactacgctggctacggcaaccttccctttataagattcacctttcgcttctgcgtgaacgagacgtgacagaagttgtctgtcagcgcgggaatacgtttttttcggcggctgataagccgtctcttccggttttgccttcttctcttggtgagatgacagctttatcggttggatagaatgcttatgatccgtttttgaaagcttcggaaccgagctttttttatttaaatcagcaaccagtgtgctgggttcttgctttggcttcttcgcaaaagtaaacagagcttctgtatgttcaatttttgatgcaggcataaaacatagaaaaaagacagccaaggcagcaaattttgtcgtcatacgatttcctccttaaatacttcactaccttaacaagagctgtgcacaaattcacggttaaagattttccagtgctcccaatcagcttttatgatggaagaagttcgttaacagccttgttattggcaggaaaacagccgtcattttcacaacattaaccaaatagcagtaaaagtatccatcggagggattttacattttgtttacatctgttacagcaagatgaaatgagaaaccaaaaaacaaaaaaaagactcctcaagtgcgaggagccgtcagcttcttggctgttctaaatactgaaatacaacatctccgccctgctgtgcaataccgcggaaatgcttaaaatcttcctgcttcgataaaactgctcgaaatgcaagaaaatgttctttctgcaccctgaattctttgatttccccggtgcgcatttggttgatacattctgaaatttcctcaggcagcaacgaacacagcctccttttctcggctttttcccgaaaatcaatatatcatctttcccccgccgggacaatgattgagcgggctgatacccatatcgctttacttcttaaagaaaatactgcaaaatattttcaaacaggatttatgataaaggagaggaagctcgtgaaaattgctaaggttggaaacgtcattgaatttaaaaacggattaaccggtattgttgaaaaagtaaatgaaaactccgtcatcgttgatgtaaccatcatggataattatcgtgaccttgaattagattccctcactgtcgtcaatcataagaattataaaatcatcagagactcctattaaaccccccgaacaatccgaaccatttacatatcccgcacaaaagctgccgcccggcagctttttcaaatgaattcagatctcggtcatttctacaaaaaaatcacctgtctcatctttattgtaaagattagtgacggatgtatagtagttggttattttaccgcggaattcaagcccacgctcgggcgccttgatgtcaaatgttttttcatacaaaaggacggcaatatcatgatacgtttcagaggtcaccttcaatataaatgaaatcatgcggccgttttcacccgcactttctttacaatcatacattttcagtcttacaccgtttaactctaacggctccataacgaacactccttctttttacaggacatgctatcatgctgaccattcctttacaattgatccgctccgaatgagaaaaaacagcgcaggcctttacaaacatatgttccctattttataatgaaacagacgagctgccatccagcacccgtcttttcattagaaagcggcgagtggaattccccccggattcgctcgtcttttttatgtaaaaccccctcatttctgaggagaaactatatggtcgattatcaacaagtcatggttctccacgtaccttggcgccttgaatttccccatcctttaatgagagtggtcaatcaattctcatcatgttttttagataaaccagcatccattcaggatagagattcattgcaattatcttcgaattttgctttgaactataaatcattatatatttttaaacactgtattccagactgacgcatcctcttgtccaagactccagctgccaagacctttcagattatatttttgagcgagttttatttttgctctgagtgactgttcattttcaaaccataatgtatatgttcccgaaggcaacagccccttgttatcgtgattgacagtaaaaatagcttttggagattgactctctgtgtcaaaaataattgtcccgttatgcctttttactaatgagtcaacaaggtaaaggggaatggcttgagaggcagattggcctttcatccaacagcggccatagaatggcaatcctaaaactagtttttcaggagagattttttgggtcagagcatattgaatggacttttccacccatcctacacttgcagtaggtccagcaaggtggctttcatcgtaggccataatcataaggtaatctgcatatttagctaaatactcgtaatcatatgatccgtgccagcccttcgtccagccaaaaggatttgccgccactgcaactgatacttctttatgtctaggaatacttttccttaccaatctaacaaaatctgtaaataaattccgatctttttctgtaaggttttctatatcgatattaactccgtccaaatccagttcttctattgcatgagaaatttgtttagctaaaagaactcggttcattaatgaaaatcgccccaaatcctgatcccaatgattgcttagaaaaggaactacttttaattttcttctatgaagagctttaatcacatcgggattagctgaacggagaagtaatgatccatcttttctgatatagaaaaaatcaggagacacaacatttaatactccgttcgtttgatcaacgtgttgaataaaatcccatcctaatccagaatagaaatagctcatttgaaacatctcataaccccttcatccccaaaaatatcaagttccccacaaataaaaaaatgaggattgtcatttcaatttgattcgtttccgaaacctcaaagattatctttctcttatctttataatttgtccaggataaattctatctgaagaaagcttattaagatttataagttgttgtaccgggatattgaaggatttagaaatcgtccataatgtatcgccggattccacatgatatacttcgtatgtcacgggaaattccatataacgaggcgttctttttactttattcgcttgatttcttattttaggtattttccccttcattcatattactctcctttagaaaaatttgttatcaatatttctaaacagtttctctctaatcttaatgatttgtccagcatatatttgatctgatttgaaatgattaagctccatgagttgctgcagggaaacattatacttcctggcaattattgataatgtttcaccgggagtaacatgatggatcacgtatttttctttgagaacatctacataatgaatggttttccctaagtttcttataattcctctgctttttagcacctcaagcattctctcggctctatgcagataggaatcattctttacagcctttttaccgtttatctgaatcttttttctctcgctatcatgattcaaatagtatttaaccttttccaatgtttcttttggggaggaagaaacgatgagatcgcggccaggtttgaatttacctcgaactgctggtgtatccgatgtcaataaaacccccccggaaccaagaatctcataggtgcgttgcgtaagttggctttcacagttttgcaaaccgataacgacttttgctgaactgtagactttatatgcttcagtataatcaaggtatccatggatccaattgcggggaatttctcttcctatatatttactcattttttcccagtttctcccccaaaaatcaatgcgaatacccttccgtataagaggacgaataagcgtttttaaagaggacgaacggaacacttccggatgttcttcaagaaaattagggtaagcattagccaccactgctatatcacaactgtattttgctaatggtttaatctggtgatgtatactttcgtgaaatgcaaagtctaagtgagctgctttaatccccatgctttcataagttttacacagagaaggcgtaaccgtgaaaacaaaatctggtttcacctttttaattaacgggatagtaaagttttgagtgtgcagcgggtcttcagttgcccaataaacgagagggatattcacctttttagtagcgttgcgaatccaggcctgcttttcccttgaatgctctggtgtccatcccatagatactattagatctggtttaaattcgtctatcatttcagtgatattttcccgacttacaggaccggaaatcattacggtatgtcctgcttccctaaacccatttggtaaaccatagagccacatgggatgactctcgaggaaaagaattttcacacattttcgccctctctttcactttttaatgtctactttattggtatgtagaagagaaataatttgtcgcggtaccagtctataaaaaatgttcaagtgcaagataacgtgattgggatatggatgccccacaaaaaaagaaagcaatctacaacatattttcctttgattttgttagcctttctgccaaaatactttcgttaataaattgcttttgtgcttaaaagaaaaagacgtacacatttgtacgtcttacattacctctgcaatagcaatttatttgcataaaagtcataataggcacgcttttatagtgattaacgattatcaatcgtctccggatacatatcatgattcatcatccgatgttcggccattttttcatattttgttcccggtctgccgtagtttgtatacgggtcaatggagattccgcctctaggcgtgaatttgccccatacttcaatgtagcgggggtccattaattcgatcaagtcattcatgatgatgttcatgcagtcctcgtggaagaaaaggcaggtcaaagtcttgtcccataagtacttgctctagacattaatcatgaagtcacaccaatttcacaccttaccaaggggactatttgtaatctctgcacagtgaaattatacctgtgctagcccgccatctacgaacaattcaacacccgtcaagtaactgctttcgtctgaagcaaggaaagatacagcgtttgctacttcttcaggtgtcccaacttttccagctggaacagtatttctggtattttccattgctccttcaagtgcatcaccaaaaagctcatcgtatgcaggtgtaagaatagctcctggactaaccacatttacacggatttcagtaccttttaggtcaagaatccagttgcgaaccagtgctcttaatgctgctttagatgctccatatacactaaacgctgggttgccaattgatccagcagtagagcccgttacaataatagaacctactttgtccgggaatagtgataacgctttttgaacagtaaagatggttcctttaacgttaatgtcgaacgttctatcaacctgctcttcagtaatttcacctaatggaaggaagttgccggtgcctgcattagcaaaaagaatgtccaacttacctttttcctgctttatcatgtcatatagtttgtctaagtcttctagcttagaaatatcaccttgaacaccggttacgttcttgccaatttggttaacagctttatcaagttcgttttgtctacgtcccgtgatataaacatatgcaccttcgtttacaaatttttgtgctgtagcaagaccaatcccacttgttccacccgttacaagcgctattttaccttcaaatttacccatacttaacactcctttagaattgattttattttatgtctagtacctttaagtacttgaagaacaacttacaagatatagtatccttcagtaagcacattatcggaagtacccacttttttgtgatatagtaactaaaaagtaataaatgtggaatggagagctttagacatgaaaaaatttagctgtgggtttgaagtgacaaaggaagttattggcggaaaatggaaaggccttgtattatactttttaatgaatggaccaaagagaacgagtgaattaaagcgcatgatcccaaatataactcagaaaatgctgattcaaacacttagagagcttgaagccagtggacttgtgagcagaaagatgtataatcaagtaccgccgaaggttgaatattcatccactgaacttggagaatctcttaaacctatcttgcaggagctctgtcaatggggaggccattatgcggagcaaaagtatgcagaaggtgaatatgaaattgtacaaccagaacaactaaagttaggattgatgtagctgctgaagtaaatgctaaacaacttcaataccatcacctaacagatgaagaacagtcagaaataaatgagatattcaattttgaaagtgaagttctaataagaagtgtcatggactatattcaggaaaactttgatgaaattcaaaaaagagctgtttcaaatgttaaagagaaggttcagaaacttagccaaaaaataaatgaagatattgataataatatttaatgcctatgatctctagataggcattttttctttcggataaaaaagaaaagacgtacaaattgtacgccttaatctgcttctgtactatcaatttttcactgcataacagtcacagttcaggttgcacctcaggtcacacttttattgagcttagtgctggtcacacttcgctgtgactcggtcacaattccgctgaaaatcagcactgaatgttcggattttactgtgactccacttggtttcacactccgtatcacacaacggaataattaccgattatcaatcgtctccgggtacatatcatgattcatcatccgatgttcggccattttttcatattttgttcccggtctgccgtagtttgtatacgggtcaatcgagattccgcctctaggcgtgaatttgccccatacttcaatgtagcgggggtccattaattcgatcaaatcattcatgatgatgttcatgcagtcctcgtggaaatctccgtggttgcggaagctgaaaagatacagcttcagcgatttgctttccaccattttttcgtccggaatatagctgatgtagatggttgcaaaatccggctgtcccgttttggggcaaagcgacgtaaattccgggcagttgaatttaacgaaataatcacggttcacgtgtttattcggaaatgattccaaaacctccggcgcatattcaaataaatagtttgtcccttgattccccaggagcgtaactccttctaattctgattcttttcttgtcatataaatctccctttctattaaactccccgtttattgccccaaagcaatgtatgcagctgaggcaggactctgacgagattcagatccgaatcggctgaaaccttatcaacgagtgtttcgtattttccgagcagatgtgcgatcaatgcccggtcgtccgtcgtatggacgttatcgtttccgacctgaagataaaacgggatattcggataccgcttgtgcacggttttcgcgaattgcagatcttcatcattaaaaatgacgacctttaagctgaccgcgttaagcctttctgccgcatcaagcgaagacacaatgtgatcgagctttgcaaaatcggttgtcatccccgaacttggcggcttcggtgaaatcgtcaggtcgttaatcattgtgaaccaatcctgatagaccgttccctgcgtttctaaagcggcgcgcaccccgtgctctttcagcagcagaatcagcgcgtcaagctgctttaacagcgccgggtttcctcctgagatggtgacatgggaaaaagcgtctccaccgatttctctcagctcgcggtaaatgtcttccgccgtcatccagcggatatcttttttggcagagccgtcccatgtaaaagcggagtcgcaccagctgcaagagtagtcgcagcccgccgtgcggacgaacatggttttctggccgataaccatgccctccccttgtatcgtcggtccgaaaatttctaataccggaattcctttagccattcctatcaccttttttcgggcggtatacgcaatagcttgtcggggtttccctgacaaaaatctgcacgcagaccggctgattctccagtgtttcgaggtaggactgcaccttatcgtaaatcgttttggccacgacctcggtcgtcggcagtgaatatctgtcatcatcagaaaattcctcatggtcattcagcaatgtatggtcataagcgccgtgcaccaatttcttcagcacgctgaaattcacgagaaagcccgaatcgtccagttcatcccccgcaactgtaatatttactgtatacgtgtgcccgtggactctgctgcacgctccggcgctttcgcggggaataaagtgcgcggctgagatgtgcatgtccttattcaactcaaacgaataaggatgctgaacctgcggataaatttgagaaagcaattagtttcgctctcctttcattttcatatattcatcatatcctttattgcggagcaggcatgccgggcattcgccgcatccgtccgcaatgatgccgttatagcaagtcagtgtgttattctttacaaaatcgagcgcgccgagctcatccgcaagtttccacgtttccgctttgttcagccacataagcggcgtatgaatgacgaacggcttttccatcgccaggttgacggtgacattgcaggatttgacgaactcgtcacggcagtccgggtagccgctgaaatcagtctcgcaaacaccggtgataatgtggcgcgcgccgatttgatatgcaagaatcgatgcaaaggataaaaatacaaggttgcgtcccggtacaaaggttgtcggcagttccccgtctttcgcttcaatttcgatatcatctcttgtcagcgcattcggcgcgagctgatttaaaagagacatatcaagcaagtgatttttgacaccgagcttttcggcaatcgattttgccacatcgatttcttcttggtgacgctgattataatggaatgtaacggtttccacttcttcaaagttttgcatagcccataataaacaagtcgtgctgtcttggcctccgctgaacaccacaactgctttttcttttttcatgtctttctctcccttatctatcattccataaaaaaagcgcctttttcggagaaggcgccctaaaaaaacataaaaaaaccgtatccaaggatacagctcgtccttagttttttatagagggtgtagctagaacctctcccgcatcaatacggattttcttcttttttcacttttgctatcataccataatgttgtttcccgtgacaataaaaaaacagcctgaaccctgtgtcaggctgcaaaatcgggtttaagccccgcgttttttccccggaaataccatcagcgcaatcccgatcagaacaaataaagcaggccagaaaacagaaaccggaatgatcggctgattcgtcatcataaagcaaagtgctgtcaaggtcagcaccgcaaccgggatgagcagcgccttctgtttcccgccgaacagccacagctcaaataaaccgaatgccgttgcaagcaggtaaacaggccatgtcacaccggagtaggaccaattggttgccgtttcaaagacaaacaagatccccgtaatcaataagatgccgcccggtacaagaagtcctgcgtttttgacaggtttcgggccgaaaatcggaatgtgaaaagcggcgcccagcaaaagaatgagagcgggccagccgcgttcgctgatggcttcatttgcattggtgaatatgccgaaaatgcccgcggcgcacagaaccgccgcagcagtcaaaagccctctttgccttctgccgaacagccaggcttcaaacaggccgaacgcaacggcaaagaggtagacaggcgatgtcacatttgcgtatgtccaatccgtcagcgtttcaaaccataacaacccgcccgtcacaagcaaaatgccgcccggaataagaaggcccgatctttttttcggctgcataaaggcagcggcgtgaaacaaaagcgcggctgcgatgatcaaaagcggccacagccccgtcatcagcataccggcaaagcatagtgctcccacggctgtcaggatgaaagcaggaatcaatacacctaacttcctcccgccgaaataccacagctcaaacagaccgagagcaggcgcccatatataaacaggccacgtcacgcctgaatacgtccatcccgttgccgtttcaaaacaaaacaggcagcccagcacaaaaaacataccgcccggaacgagcagtcccgcctggtcaggcgtttttttcgcaaaaataaatccggcgtgaaaccctgcggacattataatgaaaagaaacggccacgccgaacctgcggatatatgaataactcccgccctctgtaaaaaaaacgcaatgccgatacaaataaaaataaatcccaataatacacgtcgagctttcatctcttactcctccccatcatttcccaattcattatacagaaatgtcaggaaaaaagaaggggaattcccaaaaaatacagacattttccttatatccttatttttctttcgggatttttttgcaaatcaatgcgccgatgaaagcgaggctcacatacccaaacaccggataaacggtggaaatcagctgtccgtagccgatttggctgataatgaaagcaaacgccaaaatgccgccgtaaatatatgtactttttatatgaagaaaactgtttaattgtttttccaatccgtataaattaccgatgaccgacgtaaacacttctccgaaaataataaacaaataaatgatatgaagcgaacgcgaatacgaatagacgacttgagccatcggaatgtcaaactccagcacatccggcagcaccgataatgataaaaagctcgcggcaagcaccagtgtcaacagaacgccgccaaaataagccccccttcggatcaccttctctgaagacatttcattcgcaagcggcacaagcacggcttgggcgagcgataaatttaacgcgccgtaagagacggcggacaaaagccaattccacttgtcaggccatacccattcgtccgcgtttctcgtgcttgtaaatacaaatgaatctgctgtcacgataaaagagaaggaaattaaaagcggcacaaccaatatattgacgccgaacacacctttaacgccgcttgtcatgacggcaaagctcagtacgatcgtcaaaaggatccccgcttgtgcggaccagccaagctgttcatgaaacagcgctcccgctccggacagcatgacagaggtcactcccagcaatataaacatcataaacatgttcacggcgcggccgatggactggccgaataaatatgtgttcaattcctgataagatgctgcatgaatccgtttggaaatgatcatgattttggcgcctaaatatgtaaacatcagaccgcttaccacgataccgaacagaccgatccagccaaacttcagaaaaaactcaacgatttcccgtcccgtggcaaaaccggctcctacaaccgtgcctacgtatacaaatgcaagctgacttgcagaaccttttgtttgtcccatttcaccctccggctaagcgcagatttgtccaggcctttatatatgcttatgagacaagtcgcccgaaaagacgaacaaatcgtccttccccggagaaaacagattcagctctctcctctaagcaaaaatattgaaagaaaaaaagggccggcgtatactcttcatcaagaaaggtcaaaacatttcatttcctttctgactatattggtcaaaaataatcaaacctcacaaatatcacttatcatgctgtaaacatttatttttcagggtttgaaacaaaacacttgaaagtcaaagaaggtcagagtatactattaatcaaagaaggtcaaagttaagaccttattttctaatccatttggtcaaagatgatcaaacatttttcgaggaggttttggcaaatgcgttgtcaacattgtcagaaaaacgaggcgacgattcgcctgaacatgcaagtcaattccattcaaaaacaattcgttttatgtgaaacatgttatacagaattaacccgaaaaccgtctatgagcatggggccgcaatcattcggattcccgtttgagcaaggtttcgctcccaatcaaaataaacagcaggccggccctgaaaaaggcctgctcgacgagctcgctcaaaacgtcacaaacggcgcaaaagcaggtctgattgaccctgtgatcggccgcgatcatgaagtggcgcgcgtaattgaaattttgaaccgccggaataaaaacaatccggtgctgatcggtgagccgggcgtcggtaaaacggctattgcagaaggcctcgcgcttaaaatcgctgaaggcgatgtgccgaacaaattgaaaaacaaagagctttacctgcttgacgtcgcttctctcgtcgccaatacagggatcagaggccagtttgaagaaagaatgaaacaattaatgaacgaattaaaagaacggaaaaacgtcatcttgttcattgacgagattcaccttcttgtaggcgccggctctgccgagggatcaatggatgccgggaacatcctgaaaccggcgcttgccagaggcgagctgcaggtcatcggggcgacaacgctgaaagagtaccgccagattgaaaaagatgcggcgcttgaaagacgcttccagcctgtcatggttcacgagcctacaatagaacaagccatcagcattctggaaggcattaaagataaatatgagaaataccacggcgtcacattcagcaatgaagcgataaacgcctgtgttacgctttcatcccgttacattcaggaccgccacctgccggataaagcgatcgacttattagatgaagccggctctaaggcgaacctggagcttgataccgtaaatgaagaagatgcggctgagagactcaaagcaattgacgcggagaaaacaaaagcgcttcatgaagaaaattatgagcttgccgcgaaactgcgtgatgaagaagcggcgttggaaaagcagctggcgcatgaaacaccggcctcttcacctgaaatcggggcggagcatattcaagccatcattgaacagaaaacaggcattccggtcggaaaactccaggctgatgaacaagtcaaaatgaaggaacttgaagagcatcttcatcagcgcgtcatcggtcaggaaaaagccgtgaaaaaagtggcgaaagcggtcagacgaagccgcgccggcttaaaatccaaaaacagacctgtcggctccttcctctttgtcggaccgaccggagtcggaaaaaccgagttatcaaagacactcgcagatgaactgttcggtacaaaagattccattatccgtctcgatatgagtgaatacatggaaaaacacgccgtatcaaaaattatcggttcaccgccgggatatgtcggacacgatgaagccggtcaattaacggaaaaagttcgccgcaatccgtacagcatcgtgctgctcgatgagattgaaaaagcccaccctgatgtccagcatatgtttctgcagattatggaggacggccgtctgacagacagccagggcagaacggtcagcttcaaagataccgttttgattatgacaagcaacgctggaaccggcgaaaaacaggtgaaagtcggattccaatctgaagagagcgtcctggaggaacaaacgctgattgattcactgagcgcgttcttcaaaccggagtttttaaaccggtttgacagcatcattgaattccaatccctgaaaaaagaacatctcgtgaaaatcgtcagcctgcttctcacagagcttgaagacacattaaaagagcgcggcatcagcctgagcgtaacggacgaagcgaaagaaaaaatcgctgaaatcggctaccacccagctttcggagcacgcccgctcagaagaaccatccaagaattgatcgaggacgaaatgacagatctcttattggatgacaacgaaataaaagccttccatgtcgtaatggaagaggacggcatcaaagtccgggcacaataagaaaaaagcggttccctcctcgcggggagccgcttttttgtttctttctccatgccgaaagggagaaactgtgaagaattcgggaacaatttctcaatcaccctaaagttccatgcactgccaccgatattaaccatagaaagctagtataaaggatttggtgaaaactatggataaaacatcgattatcggtatcatcctcgccttgattgctttaagcgtgggcatggtgctgaaaggggtcagcttaagcgcactcgctaacccggcagctattctgattattttgttcggtacgatttctgcggtgatcatcgcattccccggaaaagaaatcaaaaaagtgcctgccctttttaaagtgctgtttaaagaaaacaaacagctgacaattgcgcaattaattcctatgttctctcaatgggcgcaaatcgccagacgtgaaggtctgctcgcattggaagcaagcattgaagacgtggatgacgcatttttgaaaaacggcctgagtatggcggttgacggacaaagcgcagaatttatcagagatattatgactgaggaagttgaagcgatggaagacagacaccaggccggcgcagccatctttacacaagccggcacatatgcgccgacactcggcgttttgggtgcggtcatcggccttatcgcagctctttccaacatgaacaataccgaggcgctcggacatgccatcagtgcggcttttgtcgccacccttctcgggattttcacaggatatgtactatggcatcccttcgccaacaaactgaaacgcaaatcaaagcaggaagtcaaactgcgtgaaatcatgatcgaaggcgttctgtcagtgcttgaaggacaggccccgaaagtgatcgaacaaaaacttctcatgtatcttcctgcgaatgaacgcgcaaaagtcgctgaacaagaaggagaggcaaacaatggcgagaaaaaagaagaagaagcatgatgacgagcatgtggatgagtcttggctgatcccgtacgcggatttgctcacccttcttttggctctgttcattgtattgttcgccatgagctcggtcgatgcggcgaaattccaaatgctgtctaaatcatttaacgccgtgtttaccggaggcacgggtgttcttgaatattcaagcgtcacccctcctgaaaacgaaaaagacggcgttgatcagttaaaaaaagacaaggaaaaagataaagaacagaaaaagaaagaaagagaagcagccgaccgcgaagaacttgaaggcgtgcaaaagcaagtcaatcaatttataaaaaataaaaagcttgaaactcagctggaaacaaagctgactaaagaaggactcttaattaccattaaagacagtatcttttttgattccggacgggcggatatccgtcaggaagatattccgcttgccaaggaaatctcgaatctccttgtgctgaatccgccaaggaacattattatcagcggacatacggacaatgtaccgattaaaaactcacaatatcaatctaactggcatttaagcgtcatgcgggccgtcaacttcatggctattctcacggaaaacccgaaacttgacgcaaaagtattcagcgccaaaggtttcggagagtataaaccggccgtgtcgaacaaaaccgccgaagggcgcagcaaaaacaggcgcgtcgaggtattgatacagcctagaaacgccgcgactgaccaaaatcagtaatataaaaaaggaagcctttcaaatggcttccttttttatttctgatgaaaatgtttagcgtttaaccccactcttttcagcatttccgtacacatttctatctcttcatcactcaacacactgatcatttctttaatttcgtcagcatgatcagggaaaatatcgtccaaaagacggattcccttttcggaaatctgtgcgaaagtcactcttctgtcagtcggcgaggcttttctgatgagaagttcttttttctctaatttgtcaacaacgtatgtaatacttccgctcgctaataaaattttgtcgccgatctgctgaagcggctggttgcctttgtggtacagcagctcaagcaccgcaaattccgtcgggttcaggccgtgcttatgaatatgtttattcatatggtcgttaatagatcggtacgcacgtgacagtacaataaataatttcaatgagttttctgttttatccgtcatacattcaatcatccttttacaaaagaaaccgttacagagaaacattaataaacaaaatgaaaaatgtcaacaaaaatgtttccaaaatttctcttctttttgtcagaccttaataaaataatttgtttttctatcattttggttattttttcttattaaagaagtataaaaatgatataatacctctattcaagtgtaatgttggagcgatgcagagtgaatacatttaaaggtgcccggggaaagatcaagctttatctcatattggtgatcatcccggcacttattatcagctttttcatttatgaaaaagaaaagcagaaaatagccgataaacacatacaggaagccagtatgatgctcaaccttcaccgcaataagctcaattatttaatcggtgaaacaaaagcccggatgacaacacttgcgatcgctgtcgataagcctgtcaatgaagaaaagatcattgacattctcgatcaggcttttgaggatgaacccagattcagcggtctgtatatgctgaattccaaaggtgatgtcatcgcaagcacgactgatctgaaatcaaaggtgaatttggccgacagaccgtattttacgaaggcgaaaaagacgaaaaaaacggtcatcacaaatgactactccagcagaattacaggccagcgcatcttcacgatctgcgtgccggtgttagacgcaaaacgggaagtcacggattatttagtagccgccatacaagtcgattatttgagaaatatgatcaatatgctgagccctgacgtttatgtcaaggcaaccaatcagaataaagtgatatttgccagcggacgggctgatcaatcagaaggtgtgaaaccggtcagcggctatctggatgatattaattggaatatcaatgtttatccgaaaccggttgagctgaatgagctgaccaaaagcgtgctgctgccgatgtccagtattgccgtgctgctgaatattctgttcatcctcgttcaatattatttgcttaagcgcaagacccagctggagcgcgctcaaaatgaagcgcagaaattggagcttatcggaacgcttgccgccagcaccgcccatgaaatccgcaacccgcttacagggatcagcggcttcattcagcttttgcagaaaaaatacaaatcggaggaagatcagctgtatttctcaattattgagcaggagattaaacggatcaatcagattgtcagtgagtttttagtgcttggaaaacctactgctgaacggttggaagtgaactcgctgcaggatattcttgatgagattatgccgattatttattctgaagggaatctatacaatgtggaagtgaatgtggagattctcgtcaatcggccgctcaaggtcaactgcacgaaagaccatattaaacaggtgattttaaatgtcgcgaaaaacgcgctggaatccatgcaggaaggcggccggctgtccatctatttagaagcccgcgatcataaagcagtcattaaggtggccgacaacggaatgggcatttctgaagatatgcttgagcacatttttcttccgtttgtaacgtcaaaggaaaaaggcaccggcctcggccttgtcgtatgtaaacgaatcatgctgatgtacggcggttcgattgacattcaaagcgaagtcgataagggcacagaggtcaccattaccctccctgccgcttctcgatgaaaaaaacaccctgatcggggtgttttttatttaaagaagagtatgtgtaagaggatataccagaggaacggcatcatagccggcagatagtacgaggcgcttcgtgagccgtgccagcggaaaaatgtgctgactgtacgcggtcatctttcggatgcggcgcttgatcaggaagcgcattcagtcttcgttatctgttttatcatccatcatttgtttgcttcatatgcaggcatgacgtcaccgcgggagaacaagcctattttcttcacaaggccctgtattccttggtgatgtgtacgatcacggtttaccagctgctgatacgcgttcatcagacagtccagttcctggctgtgcctgatcgtgtcatatcctgtaaacccttgcctgttagccgcatctatcatcatttttctttttttatcaatagatagaagcaatttttcttgttcagaataactgcccattcacttcacccctcaccgctaaaagaataggaaacaagtttgattgggttattgagcattattacagattatactttatttgtaaacatttttttactaaataacttattttttcatttcatattggaatctttagcatgaataagagaataatacccattcgggtaatgatataaacagaatgcggcatattcaagaattaaaaaacagccaaagctgactttatattacaataaaaaacctctcatgccggtgggtgcatgagaggttcgggcgtctatcagttttgcacactttcattttcgtaaatcggcacccagccctcagtcgtcacgaagattcggattgcgacgacccggcggtcttcctgaagcgtaaagtagtggcggatgttctccggaactgaaatcaaatctcccggatttaaacggacgtcgaaaaatgtgccgtctttgccttgaatgacgaagatgccgtgtccgctgacgataaagcggacttcatcatccgtgtggtgatgttctctttggaaattttttaataattcatcaagattcggcgtggtgtctgataaagaaatgacatcctgagactgatatccgcgccgggctgaaatgtcctgaatctccgtgtcaaacgccgcgagaatccgttctttttcatcttcggttagatcgtatttttccgaaagctcagacggaagtttttcaatgttccactgctcatagatcacctcttgttcgtctaagaagcgcgctacttcttcctgatgttcaatgagcgtatttttttcgtcatgaattctgatggtcgccattttctattcctccttttattttaccagctgcggccgaagtgacagaagcttgaggtgacagctgaataaaaattcataggcttccagcacccttttcgcttcaaatgcggtccgcccccatgccgtaatgccgtgattgcggattaacaccgcgcctgagccggcggccgcatggtgcgcgaagttttcggccaatgccgggatgtgcgccggattgtcaatgatcggaacggtcacggacgcgttttcctcccataatccgagcgccttaatcatctcctgcccctgaaaagtgatttgtttttcatccccgtaaagctctgagatgacattattattgacggtatggacatgcagacagcagccggcgtctgtcttttggtataagtaagtatggagaagcgtttccgctgaaggttttaaagaatggccggtctcagcgggcttcccgtactcatcgattaagagaaaatcttcgtctgtttcttttcgtttgtcttttccgctcgccgtaacgagaaaagtcagcggcccgtcggatactttgatggaaagattcccgctcgttgccgggaaccagtctctttcagccagctcgcgttttacctcggcaagttcgcgccagcgttcttcttttgcagccatgcctgcacctccccgatgttttcaatgcctgttttcacctcatgaaaatcttgaaaaggcagatgccggaggccgagttctttgcattcagtcaaaagataatctctcgcaaagcacatatcggacaactttgcagcctcgacatccgtgaccgaatcaccgatcataatgagaaacttctgctgatcggatagcttacggatgactgacggtttgcagcagccgcattgattggtacagtctccgtcacaggcgtgcggccagtctatatgaatatgctcattgtcaaaggatgcatgattgcagaaaatccgctccttttctacgatcccttccaaaagcggatgcacaaaaaagtccattcccccgcttacgatataaaacgggaggccgtttgaccggacaaacgagacaaaatccaaaaagccgtcccgtattttcgcatccttcagaataaagccggtcagttcttcttttaagctgctcggcagcagtccgaacatccggccgactccttcttggattgatatgcttttagacagaacaccgtcttttaattcaagccactcaggaggcgcgaattctttcatcatgctgacaatgttgtcgttcatggtgaccgttccgtcgaaatcacaaataatcagcggtgtgcgggtcatacggcttccacccttccccatttgtctaatgcgagctgaagatctttgcacgacgcggctttttcttcaatcggctgcgcttcaagcaccgcatcaatgatggcgcggaacgcttttcccccgccctcggctcctttcggatggccgtgaatgcctccgccggcattgatgatgtgatcgatgccgaaatcgcgcatcaataatggcaccataccggggtgaatgcctgctgacgggacggcaaacgacggatgaaagacatcgtcttttacacattcatcatggattgcaagcgcggactccttcggaagagcaacggatccgtaaggtgacggaaataaactgaaatcagcgccgcaatagcggttcagcttgccgagcaaaagcgcatgcgacaagccgtaaacgggagatgatgtgaacgcgccgctgactgccggatgcgccatgatcggaagcgggatttccctgtcctcagcaaggctctgcatcacatctaaaccgtaagcaaacacattcaataaaagcgcgtccgccccgagttctgccgcgcgcctcgctttatcccgcaattcagcggtccttcccgtaaggtttacggcatacagcgttttatgccccgtttcctcccgggtttccttcaggacttgttttccttcgataatgcgggtttcaaacggagccagttcattttcaaagaaaatttcgtcatctttaataagatccacgccgccgagcgcctgctgtctgagctgttctttaatgtcggcgagatcccgtccgatcacgcctttaaatatgctcatcagaagcggtctttcaaattcgcccagcagtttgcggatgccgtatataccgaatttcggcccgggaagggagcgtttaaacccttcggaaaattcaagatcagtcaattttatttttccgtccagtgacagctttccgaataccgtcgtcaggacggccggaatatctcttgaaaaattcgcctcgggataggcgatggtgatgacggattgtgtttcgttttctgaggttccttctttctcctcaacttttacgacccgccctttatgttttctgagctgttcctgcttcaccaggggcaggtcagtccaggagcctaccgtcagccccgccgcaatctgttccgcccgcttttcactgtccgttgtgtctgtcagaagatatgttgccaatacttcgctcatgcgtgaacgcctctctttctttcgcaaaacataaaaaaacctcttccgtatgagcagaaagaggcttcgtgttatgtccgaatcttatctctcagctcctgctgcaagaattagcaccgtgctttatcagtcggttgccgggcttcatcgggctcgtccctctgcctgctcttgataagaataatgattttataaagtattttgaattatcgcattgttatcctgatatgtcaatgctttttcgggtgaaaagattcagtttcccgatcctttccgcagcttctttaagtctttcttcacttgtcagaagaccgactcttatatagccttccccccattttccgaacccgtttccggcagcgaccgcgacatccgctttctcgagcagcaggtctgaaaacgactgtgacgtataaccgtcaggcacagggagccatgcaaaaaaggagcccgccggagccgtcacatcccagccgatatcgcggcaggctttaatccatgcattgcgtctcgattcatatctgtcattttgcgccgcgacgcatgcctgatccgctaaaagtgcggctgccgccgcctgctgcgccgcgggaaacaggctgacaaacatatgatcctgataaaggttgatcgcttcgatgacagaagcgtttccgacggcaaatccgacccgccagcccgccatattatacgttttggacaaggtatagatttcgattcccgtctcttttgcgccttcggtctgcaaaaagctcagcggtttatgcccgtcaaagccgacggctccgtacgcgaaatcatgaacgacacaaatgccgttttgctccgcaaaaccgaccgtctcctcgaaaaacgcctctgtcgccacagcgccggtcggattattcggataattgagatacagcagcttcgcctcgctccgcaccttttcaggaattacgctgtaatcagggagaaaccctctttcttccgtcagcggcatcatttccattctcgcttttgcaagggcgacgcctgaccagtaatcaggatatccgggatcaggcaccagaatggtatctcccgggtttaaaagacattgcggaagctcaacaagtcccgccttgcctccgaacagcacggcgacttccgtttccggatcaagcgtgaccccgtactccctttcataaaatgcagcggctgcttctttgaagctgtaagcgccccggaatgatgagtatttatgattttccggcctttcgacggcgcgcttcatttcttcaacgatatgctgaggcgtcggctgatcagggtttccctgccctaaattgatgacgtctctgccttctttcagcttttgattcactttttgcaccaatgatgcgaaaaattgttccggcagctgtttgagtacatctgagatttcaaagttcatattttcaccttctaaaaatgtcttgaaatgatagtccatcatcatatatggttaaataaaaaaagtaaagagaaacttgaggtgttaaaaaatgaaatggaccgtttcctgtttgcaatttgatatttcatacggaaatccttcagaaaactttaaaaaagcagaatctttgattgagcaagaaagccgccatgcggatgtaatcgtgcttcctgagttgtggacgaccggctatgatctcacacggctagaccagctggcggatgaaaacggcaaagtttcggaacaatggcttaaagaaacggcaaaaacatacaacgtacacctcgttgccggatcttttgcggtcaaagaaggcgaaaatgtctataacaccatgtacatcgccgataacagcggacagatcgtgaagcggtatcagaaagcccatctgtttcagctgatggatgaacacctttacttgtcagcaggaaacagcgacggttcctttgagcttgacggtgtcaagtgcgccggactgatctgctatgatatccgtttccccgaatggatcagaaagcatacgtcccagggcgcgaatgtcctgtttatctctgcggaatggcctctgccccgccttgatcattggcgaagcctgcttatcgccagagcaattgaaaaccaatgttttgtcgcagcctctaactgcacggggtccaatcccgataatgaatttgccggccacagcctgattattgacccgtggggccggattttagccgaaggagaccggacggaaggcgcagtccgggcggaaatcgatgtgtcagaaagcgcggccgtgcggggaaccattccggttttccaagacttgcggcgtgatttatattaattttcaaaaaaatgttgacaagaatatccggcacctgctaatattttcatcaactgattaatccgaattgtgatacaaatcaatatatttttctcttatcgagagttgggcgagggattggccttttgaccccaacagcaaccgaccgtaattccattgtgaaatggggcgcgtacattttgcgccgagacgattgtctcataaggcacggtgctaattccatcagatgttatctgagagataagaggcggactgcactgtttcagcctccttctctttcagagaaggaggctttttttcgggcgtattctccgtcacgatctcttactgccactacataattggagggtaaatccatgtcagcaactaaaataagtctttatgaacaattaacagaaagctccgccgccgcgttagccgtcaagctcggcttattccaaagcaaaagcactctgacatgccgtgaaatcggcgacggcaatttaaattacgtctttcatgtttacgataaagaaaacaaaaaaggactgattatcaaacaggcgattccttacgcgaaagtcgtcggtgaaagctggccgcttacaattgacagggcgagaatcgaaagcagcgccctcatccgccagggcgaacacgtgccgcacctcgttccggccgtttactattccgatactgaaatggccgtcacggttatggaagacctctcgcatttgcggatttcaagaaaagggctgctggaagggaagcattatcccaacttatccgcccatatcggtgaatttttagggaaaacgctgttttactcatccgattatgcgcttgatgcgaaagtaaagcagcagctcgcaaagcagtttacaaatcctgagctttgcaatattacggaaaggcttgtgtttacagaaccgtttctcgaccatgagacaaacgattttgaagaggagctgcgcccatacgcagaaaaagtttggaacaattcccggctgaaagaaggtgctgacgaattgaaagccatctttctgaattccgcggaaacattggttcacggcgatctgcacacgggaagcatcttcgccgatgaacatgaaacaaaggtgattgaccccgagtttgctttcttcggaccgatcgggtttgacatcggccaatttatcgccaatctgctgttaaacgccctcagccgcgacggtgacgacagacagccgttatatgatcatactgccgccgtatgggatacatttgtgaaaacattcagtgaagcatgggagaaagactgcttgccttcccgcagacacctgctggaagacacactgaaaaacgcgtttgaggaagcggtcggttttgcgggatgcgaactgatccggcgcacgatcggactcgcccatgtggctgacttagatgaaatcactccgtttgacaaacgaatcgaacggaagaagctcgcgcttgacatcggcgcctattatatcgaaaacagaaaaaaactgaagcatatcaccgaggttctggaccaatttaagctccgtgtaaaggaatgatgcagcatgaccaatgaatttgccatcccccgttctgtagaatggaaagaaacctacatccgcattttaaatcagcaaaagcttcccgacgtcactgaatatgtggaacttgaaacaaaggaagatgtattcgacgcgattgtcacgctgaaagtaaggggcgccccggccatcggtataaccgcggcgttcggactcgcgctctccgccaagtcgtttgaagcccgcgacctttcggatttccgacgtcagttcgcggatgtcaaagcgtatttaaacagttcgaggcccactgccgtcaacctcgcgtgggcgcttgacagactgacggattccatcagggatgcgatctcaatcaatgaagcgaagacaacgctcgttcatgaagccattcaaattcagattgaggatgaagaaacatgccgaatgatcggccagaatgcgctgcacctttttaaaaaaggcgaccagatcatgaccatctgcaatgcgggctcgattgccacaagccgatacggtacggcgcttgctcccttttacttagcgaaacaaaaagatctcggccttcatatctacgcatgtgaaacaagacccgttctccaaggatcacggctgacggcgtgggagctgatgcagggcggaattgatgtcacgctcattaccgacagcatggccgcccatacaatgaaggaaaaacatatttctgcagtcattgtcggcgctgacagaattgcaaaaaacggtgatacggccaacaaaatcggaacgtacggcctcgctattttggcaaacgcctttcaaattccgttttttgtggccgcaccgctttcgacatttgacttgcagattgaaaacggctatcagattccgattgaagagagagatccggatgaagtcagacagatctccggcatacgcaccgctcccgaagatgtgccggtcttcaatccggcctttgacatcacaccgggcagcctgatttccggcattataaccgagaaaggaattgtgaccggctcttacacggaagaaattgaacaattattcactgactgccagctgagctgaaaaaccgctgatgatattgcctcaggcaatgtcagcggtttttttgtctgcacaatgtaatcacttcatctttttggacggctgtaatgagatgcattttaaaaaacagctctgcataaccggctatcttttgcggacggctcattttcatcaggcttcgtcctcctttttcatcagaccaacttttttcacttaataaaatgatatgtcggacgtgaaaaaacggaacgtgccatacgctttatttttctttataggatatttgttcgatgttcaacagcaccgcttttacatccgtcttcgtgcccgcgtatcccgttaaggcgctgtttttgccgattacccgatggcaagggatcaaaatcggcagccggtttcgtttattggcttgtccgatggcgcgcaccgctttcggttttccgatcgcttcagccatatcgccgtagcttcgggattccccgtaaggaatcatcgtcagcgcgttccataccctttcctgaaagggtgtgcctttttgtctcagaggcagagagaattgctttctttctcctgaaaaatatgatgccagctgctgtttcgcctccgacagcaaagcggtttcgcacggctttacgccgggcgcgtctttccgccattcctcaaaatcttccccggtgagaaacaggccggtaataaagctctcttcctctgttatgatgacggttccaaacggcgctctcacacttgtaaaacagatcattccccgctccttctttcttcggtattctgccggatcggaagcgtcaaatgaaaaacggtgcccttcccttcttcactttccacatgaatgcgtccctgatgttcttcgatgattttatagctgaccatgagaccgaggcccgttcccctgtcttttgtcgtgtaaaatggttcacccagacgttttaatttgtcttcggaaatgcctgttccttcatcttgaatagaaatcaaaatgtggtcttgatcagaagactgaatggtcacgtagatattgccgccgcccggcatgacttcaatggcgttttttaaaatattgataaacacctgttttaattgattcggttcacagtaaatcggcgggatgtttccggtcaggttcagatggatctgcacattgacaagattggcctgggcattcaaaagatcagccgtgtctttcataatctgcgtcacgtctttttcttcatataatatcgcctggggtttcgctaaaattaaaaattcagtgatgatagactcgattcgttttaattctgaggtaatgacgttaaagtacagagaatattcgccttcaatgcttccttgaagaagctgaatgaaccctttcagcgccgtcatcgggtttctgatttcgtgggcgatgcccgccgccagctcccctacaacatgaagagtgtcggatttccgcagcctctcttcaagctctttggcctctgtgacatctttaaagatggccagattcatattttgaatgatatttcttttgaaggagaattccagtttgcggctgtcgctgctgcttaacaggaaggggatttcattatccattccttctaaatcaatctttctggcgggaacacccgcgttttcaatatcaaataaagaaagaatatccggaacggtgtacgctctcagctcctcatccggcataccgagtatacggcttgcgagaggattcgcgtcaataatgcggaattggttgtcaaataagaccttgccgtccattgagccgttgaatacttttctgaatttcagctcgctttcccgcaattccttttccatccgcttacgatcgctgacatttcttaaaatggttaaatgctgaccttcaagtatggttcgttttgatgtgaattccagctctttaaattggccgtttgccatctgaaacagcatttcttcacggatttccccgtatttttcatattttttcttaatctgtttgtattttttctgcggatcaacgataaacgtacataaattcgtctccaccagtttatccatcggcagttcgaaaatgcggcacgccgattcgtttgctttggcaatctttccgtcatcagaccaaatgacaatcgcgtccatggcgttttcaaaaatttcgcggaatcgctcttcgcttttgaaaagtttcaattccatcaaccgtttctctgttatgtccctcataatggacatgtagaacccgctgattaagttggacgtaatcgtaaattcaaacagcttctcttcgcccgaccgaagcttgacgggcagttctcctttggcgtttccttttctgcggagggtttcccagatttctttcagatgctttttgttttctccgtcggtaaaatggcggagcgacagatgggacaattcattctggccgatctcaaagcttttgcaaaaagagaggttcgcatcaataaacccgccgtccttatcaaacagcacgatgccgtcgacagccctgtcaaacaaatctttaaacagctgctcgttcatggagaattcgcgctctaatatttttttagaggagatgtccctcatcaccacaaaaaaataatcctccccaattccgtctctggcgaggaattcaatgtatttcgtcgcgccgctgtcaagcttaatcggcacctctttccacagatggcctttttttaaaaactttttcacggccttattcagttcttcctgaggcacggaatataaaaaatccaggacggagcggttaatgaggttctctgcctcaatctgcatcatccgggccgcagcctcgttcgcctggacgattttcatttccttacggcatataaaaatggcatcaagcgtgttattcataatcacgtgataccggttcaaatcactcttcaggcggtcattttcctctttcatccgcttcagctgctctttcagcgactcgtttgtttgcaaatccagagtttcagccattcagtacactccttcttcaaaaacctatccttcaatatttctacaaaatacctcatcttccttcattcgccctatacatttcagaaaatttcaatgatatgacaagttaaagtctttttctacgatccttacctccccattacatcatcctaacaatcccttttgtcctccttcaattttttgttttttattttaaaatgaacaccaacaggaaataatcatgcagtggatgatttttgaagagaaggtgatgctatgacaaaatcgcgagacagttactttgacaacgccaagtttatcttgatttttctggtggtgttcggccatatcctccggtcatttattaacggaaatgagtttatgctccacctctacaaattcatttatacttttcatatgccggcctttatcctggtttccggctatttcgcaaaaaactttaagcggaaaggttatgtgaagaagctggctgtgaagctgattattccgtacctgatttttcagggcatttactcagttttttactatttgattcaggatgaaagcatggcaagcgtcaatccgattgatccgcagtggtctctctggtttttagtcagcttattcttttggaatctgctgctttacccctttacgaagctgccgaaaatgtgggcgcttggggcgagctgctggcttgccgtcatgatcgggtatcttgattttatcagcagcacgctgagtctttcacggacgtttgtttttctaccgatgtttctcgtcgggttttatttaaagaaacggcactttgatttgcttcgggctaaaagaggcaggcagattgccgcgggcgtactggggattgttttcctcttatgctggtgtattgattttgattactcgtggctgttcggatcggagccttattctacattcggcacagtgtcgctgttgagcggtctgtcgcgcatcggctggtatgttttggcctttgccgccactttcagctttttggcgctcgttccgcaaaagcgttatttctttacgaaatggggtacgagaacgttttacgtgtatctgctgcatggattcattataaaaacgctgcggcagatcgggcttgaagatcacttatctgattatcagaatttagtcatgctcttaattttaacggccgctcttacgtccattctctccagcaatgcggtgaaaacggccgcacagccgtttattgagctgcggatcaccggctggcttgaagcggtgaaaggaacaagaaacagtgcttattcgaaataatgcaaaatacctcttaagcgttatcgcctaagaggtattttttattgtttgccgtcttcttttttctttggcttcgtctgttcaagcgtttcaatccattttccggcgttataatcaccgagctcgcttgcaaactcttcttcaagcaatttagggtccatcggctttttatggttttgcatgtctttgctgtggcggttttttttcgtcatgttactcgcctccttgtttgccgtgttttgatttgcggtttgcgcctctcagtccgggatcaccgtcatattgtgttttatatgcatctttgtccatgctctcagtcggtgtgttgttgttcgtcaaagcttcattctttgctgctttgcgtttcatttgatttcctccttctgtcagcaaatctgttttgaattcatcaagcatttttttcaagtcgcgcactgtcacgtttttggcctcatcaaggagctcatagccgatctgtccgttcggctcaagcagcacatatttaaaatcttgaatgtctccgaggccttcctgcctgatcctcattgacagctgagattcggtaaaacgcattttttttaagttttccgggatgacttttccgtttctgacaacggcgacggtttttcctgaaaataaaaactcaaaaaagcttgatttgatttctaaatattccatcaggattaataccgcaataaaaatcgccgccgcgaaaatagtttcccataaattatgttcaataaacggctgaataataatcgagccgatcgaaatcatgatgactgtctgggtcaccgacagctggctgattgatttccgtccggcaatccgcaataaaaaggtaccgaccgctatcataactaccgacttccaaaatacggtaaacaatgacgtcacctctttacaagtagaatctccaaagaaactgtttccactcatccattttacggcaataaaaaacaccgctttctgaaaagcggtgtcagccgataatcattctttccttcggatagtgataatttgcttcgatttcttttcggccgatcagataaaggaacgtcaaaatgccgatccggccgataaacatgacaatcatgatgacgcattttccgatgtcgcttaaatgcggagtaatcccaagcgacaggccggtcgttccgaatgcggaacacacttcaaaaagcagtccgaggagcgtctgatttttctcggtcacggccagaatcagcgtcgatccgaacacgagcagaatcgccatcatcgtaacgaccagcgacttcatgacatcagcctggtgaagctcgcgtttaaagaccttgaccgctttatttccccgggcaaaatgaaacagggcaagaaggttaagcgcaaacgtcgtcgtacggattccgccgccgaccgagctcggtgatgcgccgatgaacatgagggcgcagatgaaaaataatgtcggcgccgacagctggctgatatcaattgtcgcaagcccgccgcttcgcgtagcggttgattgaaagagacataaaaataaaacatcatgccagcttttccccttcatgacatggcttgcttcaagcgcataaatgcccacggctccgaacaaaacgagcattccgaacgtaacggtcgtaattttcgtaaacagcgtgaatgagtatctgcgctgttttgaaaacaaaaagtcctttacttctacgagcaccggaaaaccgatcgcaccgaaaataatcagaagcatcgtaataaactgcacgaaatagtcatgtctgaacgggacgagtgaatttcctgtaatatcaaaaccgccgtttgtcgtggcgctgacgctcgcaaagaatccgtgcaagtacgcctgttcaaacgaatcataatacgttaaaaaatatgttcctaagatgatgccgcctaaaaactcgattaataaaatcaaaaacagcacttgcttcatcaggttgacgataccggaaaactgcgattgattctgatccaccatgatgagcttccgttcccgcagaccgatccgtttgcccataatgagccagacgaatgttccgagcgtcatgatgccgattccgccgaattgaagcacgaaagccaaaatgacaatcccggccgtgctgaatgtatcagccgtgttgacgaccgttaaaccggtgacactgactgagctgacagccgtaaacagcgcgtctataaacgaccagctggccccttgtttgtgggcggccggcagacttagcaaaataaatgccaccgtcacagcgagaaaataatataatgcaatcagctgtgcaggcgacaagatctgtatgaatttcttcagttttaatttcataagatagttccttctgcctctcaaatgtagtacgtaattattctaatgatattgggagaatttttaaaggtctttttagaaagatttttcattaccttatgtaatttgccgatctttaaacaaaaaacctctgaaacgattgtcagaggttttgttgattattttgcttccagcctgcggatgcgctcatcgagatcagggtgtgtggagaacagtgacgaatgctttttaccgttaatttttaacgtctgcaccgccgtctggtcctcttcattcacatgtcctgtataagacttcagcgtacgcagggcgtgaatcattttatccttgccggcaaggtctgcaccgccgcggtcagcgtgaaactctctatggcgcgagtaggcgaagacgacaagactgccgagaatggaaaagataatctgaaacacgatcatcgcgataaaatgaacgaccggcgcgaggtcttctttgacaaagcggcttgcaacccatgccgcgattcgggaaaggaatacaacgaacgtattgacgattccctgcagcagcgtcatcgtgaccatatcaccgtttgtgatgtgtgcgacttcatgggcaagaaccccttccaccgcagcatcatccatctgctgcaataaacctgaagaaaccgcgacaagcgaacggcgcttagaaggtccggtcgcaaaagcattgacctccggggaatgataaatgccgacttcaggcattttcgtcatccctgcggcacgggacaatctgtgcacacggtcaaccaattgttgttcttcatagctgagcgactgtttcttcggatttaacacccggacgcccatcatcgttttggccatccatctggacattccgagagaaataaaagaaccgacaaaaccgacgacaagactgaacacgagcaatgccatcagatcaatgcggccattttgtatatacgagccgacaccggtaacgcttgtaataatcgtaagcacaattccgattgtcgtaatgaccaaaaggttcgttaaaataaacagaaatattcttttcgccataattacctccgtcttttttaagatcaaaagaacttatttacttaaattataaatgatctgtttgaaaatgcaacaatttcgacgtatgatgttaatgtaattctcagtgatattaaaaagtgaacacgtaatcaatcagaggtgaaccatgaacacgtttaaactgacccgaactgatatggtccggcttctttacgcgctaaaaggccaaggagacgcaacccctctccaaatcttattgcaatcagcggatatgaccttggatgaggcggaaagccgtctgcatatccctgaatttctgacgagattcgaacgaaaaaaagagaaaaaggaatacgggctttcaactaacgagattgtcgagctgggaaatctgtgcgagctgacgtctttaaaatcaaccgccgtccaaaactgggtgaagcgcgatattaaagatttaatcggccaccccttactcggcaaaaaatatacaattgaacaagctgtcatccttctcattgtacgtgatttaaaatcaatttatgacttcgaacatatacgcggcatattaaaaatcgcttttaacacgatcacagacagatcagacgacgtcatcagcccgatcagctactatgaaagctgcgcccaagtgattgattatcttcatcataaggcaaacccgccgatgaaggaaacgagcctgcaggagctcgtcgaagagcagacggacaagctcaaaggctgctttaaagaactcggaagcggacaatggaacaatatcagatccataatcgccgtcacggtgctctccgttttgactttccatattcaagcctcagcctacaaaatgaccagccatttattataattcataatgcttcttcgccccggtgtctgcgccgggttttttttgctgtacaacaattgccagcataatcaataccgttccgtttgaaactaaaacgcgaaaacacatcttgccagagaaaaggagatgaaaaagatggcgagcagaaataaactcttagttccaggggctgagcaggcacttgaccaatttaaatacgaagtggctcaagaattcggcgtgaaccttagctctgatacagcagcacgcgcaaacggctctgtaggcggggaaatgacaaaacgtcttgtacagcaggctcaatcacaattaaacgggaaaaatcaataatgcagcttattcgccggggcttctcggcgaattttgatatttatcggcattctcctttccgtgccggtagccgttcggattccttcggtctgacgaatcttcatgatgccgataggattcccaatgttcattgcgatcatgattccagtaatgattgtaatacttttgcttaggctctttgtcatttccgttttcctgaggattttgtgttgggggctgctctgtttccccatcttgttccttctgtgtgttttcctctgatccggaagctgcatttttttcggtttgctgattgccgtcctgactgtccggcttcgcttcttccgtaccgggcgttgtttcattgtttcccggcttctctgctgccttttcttcatcaggagctgtcttttcatcagccgccggcttgtctgtgtccggctgctcgctttgatcagcgtctgtttcggtatctttttgatctgtttcattgccgtcggtttgcttttcaggctgtttttcttctgttttcttttcgtttcttcttatgtagctgcctgttgacatcccttcctgttttgctttttctcttgtttccatatcagattcaagcgattggacctggtaggtgcccttatatttttcagtcatgtcagccagctgttttttaacgccttttttatatgtattgtcatctgtattttcataaaccgtggaaattaaaatctcttttgattcctttacatatccatgcttgctgcaatcggtaataatattactgatgacttccttaaaatcgctgcttttccaatctccgatgtcactgatgacctgtttggcgtcatggttcagcggtgtcagttcaatgacttcatatttgctgtttaaagccatttcaatgctgggattaatgtcaagcgtcatatacgcgtaagctttgttatcagaaaaaaccgggagcaaaattaaaataaacaaaataatagcagtcatcgtaaacactcccaatttaaaagggcgcagtttcagaaaatcaaaaaagctggcccttcttcccatacgcgtttcgccttcgaacgtaatttcctctccgatttcacaagtgcggtgatcattttttgtttttaaaaattgtccgtcaggggttagcaacgtgacgaattttttatttttctctactatgatccctcttctcatgagtgcaacacccctttaagataatcttttaaataaatataatcaccggtaataataatactcatggcgatgatatattttcggttccgttcgatcgtttttctgctgaccgacacgagctgctccagctgtttgacaggaagctgttttttctggtgcaaaatggacgccagctcttcattttcaacaagcgtgtaggcaaccttaatcgcattctgcctcgcatctgtatgcttcggcgattgttccagcagctctttaaaagacaggccgtattctttcagctgcttctgaaaaaaaagaatttcttcccggcgctgttcctgttctatctgtttgcggtattcatcaatggaaagctccgcttcgataaggctctgcgaagattcctggtcgtcgccttcctgcacatccatattgatatgctgagcggttcttgcttcttttctgatatagtctatcacttttctttttataatcagctctgcaaatgcaagcagcgaattacctttttcagccgaatatttttcaatggcttcgttaaacgcgatcagcccgatgctgaattcgtcgtctttttcatctatatatcgtttacaaacggatgaaaccgtcttcgcgataaaaggcttatattgctgtattaaatcgttctgcagatctttgtcgcctttttgtattttttcaacagatgtttcaagcgtttgcttcttttttcccaatttaaacaaaaggctaagcactggtttcacctcagttcctccctataactactcataatcatagctaatttagtagggattcgcaaaggaagaaaaagagaaatcgatttcatttgtctcaattatgacaagccaataagacgtactatacatgatttcgtgcccccatgcagaattaagggggttttctctgtgttttttgtaacaatgctgttataaaattgttatcatatgtcttaaatgtaagcgtttcaaacaaaaaagggaacctgctttttaaaaagccagactccctttttgatcattttacgcgtgttctcttttttccgattccgcgccggactctatttgttttgctcctgacataaaccatccgcaaaccgcaatggcagccagaaccgcccagaaaatgattttccaggccgccgaatggatgatatctgccggaattataccgagttcctcatgggccaatgtataaagagcgagcttcacgcctacccatccgacaatcacaaatgccgccgtttcaaggcccggcctggttttcagtaaggatacgaacattgatgccgcaaaacgcataatgattaaaccaattacgccgccggctaaaataacgagaaactgaccgccgtccaagccgccgatggcaggaagctgagttcccgggagcgttacggcaagcgcgaccgccgctaaaatggaatcaacggcaaaagcgatgtccgcgagctccactttcaagacagtctgccaaaacccgctttctttctgcgttttctgaccggcgttatctttaaatacataccgcttcagcaaatggctgaccgcaatgtaaaacagatataaagcgccgacggcctggacctgccaaacattcaccagaaaagaaatggcgaacagcgacccgaaacgcaaaataaatgcgcccgccaatccgtaaaataaagccttcttcctttgtttttcaggaagatgcttcaccatcacagccatcaccagcgcgttatccgccgccaaaatcccttccagcccgattaaaacgagaagaacccatccatactccaataataatgcaaagtccaatccattccctccgtttcttttttctatcatccgagcttataccggcggttttttacgcaaaaaagacctttgccgatataaggcaaaggtcttgctagacatgaatgattggcatgccaacaaagccgatggatatgatccatgaattgacgactttgtttccggaatatccggacgctactcccctttgggatttcaagaaatatttgtttatacgctcatgataaagcctgtttcatcatttgtcaacgcttaacttttttaacaaattgagaaattttttctgttttggcccgctgttttcttctctttaaaaacatccaaagaatgagaagcaacacaatgaatataccgagcggcagcatatattgatcgagaatggaaccgacgcttttccaattttccccgagtttcattccgaggtatacgtaagcaaatgtaatcggcagcatcgctgcatatgtatatagagagaagacccagacattcatcttcgcaatgccgcacggcaaagaaatcagcgtcctgacccccggtataaaacggccgctgaacgcgaccaaacctccgtgcttctgaaagaaatcatctgatttctgcagggattcgggttttatccatatatactttccatatttcagcaaaaacggccgaccgcccagcctgccgattccatataagacaagcggacctgaaacaccgccgagcgaaccggcaaacacggtcccggcaagcgtcatatccccttttgagacccaatagcccgcaagcggaagaacaatttccgccgggatgaattctatactgagcgccaaaaaaattccggcataagataagcttttaaacgcctctattattgatatgatgaaatcttcgatgatctatcactcccggcttacgtctatattccgaaacttaagaatgattttaacacaaaaccttgaggctgaaatatcttttagacatgcccgttataaatgtgagtcgtttcagatcggtatagcgggagggaatgacatgcgcaatacaacgtcccgcctgtctcctgattgcttgtctggcggcgtttacatcacttaagatctcccgaaaagtaagcggcggctgaccgcggattcagttcatatgggagcgggaaattttctcagtcaccacatgggaatgcgtgggcatttcccggggaatgattttgtataatctttttgattaccgctgatgattttcagggacttcagcgctttaaagaacttaccgattcactgattgtaaataaagaattcatttccttttcagccgaccatttccgcctgaggaaatggaacagccgctccatgaagcgccgcaacacccataagttgctacacatggaacggacccgtttatccacaataaagacaaaaaggagtttttattcatgcacacgatgtggaagggttcgatcagtttcggcctcgtcaatatcccggtcaagctctttgcggccactgaagataaagatataaaattccgcagtcttcataaagaagaccatgcgccgattaaatacgagaaaatctgcaccggatgtgaaaaaagtctggaacctgatgaaatcgtgaaaggctatgagtatgtaaaagggaaatacgtcattatgacagacgaagacttgaaagacgtaaaacaggaacatgaagaaaaagcggttgagattgttgactttgtccagctgcaggaaattgatccgatttattttaaccggtcatattatgtcgggccgggagataacggcacaaaagcctatacacttctgcgggaagcgctgaggacgacgggtaaaatcgggattgcctccattacgatccgctctaaacagcagcttgcgattcttcgcgtgtatgacaactgcatcgtgatggaatccattcattatccggatgaagtcagaaatgccggacatgtgccgggcgttcccgagcagacagccgttaatgaaaaagagctgcagacggcgattacgttaattaatgagctgacaaccgagtttgacccggaacaatacgaagatacgtaccggaaagcccttctcgctaaaattaacgataagctcgaacatgaaaaagcgggcgtgacaccggctgctgccggcccgcgcgaagatgtcatcgatcttgtcagcgcgcttcaggcaagcattgaccggacgaagcggccggatcgcgaacaggctgcaccggcgcggacaaaagacgccgcgtcagcaggcggcggaggcaaaaagcagaagacgaccagacaaaaagccggaacgtcttaatcatggtgctgacgatgcagccgattttgacctctgtaccgcctgaaggcagtgagtggcgctatgaggtaaagtatgacggattccgctgtcttctccgcatagacgaaagcggcgttacattaaccagcagaaacggacagacgctgacgaatcaatttccggaaatcacggcttttgcggctcggtgttttcagcacatgaaagacaggttccccattacgcttgacggagagcttgtctatttaatcaatccgtacagagcggactttgagcatcttcaaatccgcggacgtttaaaacggacggaagcaattgaaagcaccgctgatagacggccgtgccgctttctggcatttgatctcctcgttctggaaggcgccggcaccgtctcattaccgtatgtgaaacggaaacgcgccctttccaaactgcttaaagaagcaaatcttcccgcctgccctcatcacttagcggaagaagcgattcaatacattccggaacacactgactttgatgcgctttgggacaaggtcgtccgccatgacggagaaggtatcgtagcaaaaagggcttccagcggctgggcggaaaataaacggtctcccgactggcaaaagtataaacatatgaaaacggcacatgtgctattaaccgggtttaatccgaagaacgggtatataacggcctctgttttaaaagacggcaccgccgtcccgatcgcttccgtttcccacggcatgcaggcggaagaaaaaaacgccgtcagaaccattatggagacccacggaaaaaaacaaaaaagcggcgagtatacacttgagccttctatctgcatgaccgtgcagtatttaaccatattgcaggacacgctgcgtgaagtatcttttgtgtcttttcagtttgaaatggattggacggaatgcacgtatcagcagcttatccttcactctaaaacgctgccgccgaagctgcagttcacaagcctggataagattgtttttaaaaaacgtgaaaaaacgaaagcagatttccttagttatatggtgaaaatgagcgattttcttatgccctttcttaaagatcgggccgtcacggtgatccgttatccgcacggcgcgcctggcgaatctttttttcaaaaaaacaaaccggactacacgccggactttgtctcaagcgtgtttgacgggagccacgagcacatcgtatgcagcagcataccgtcacttctatggctggccaatcagctggcgcttgaatttcacgttccgtttcagacagtgcattctgaaaggcccgcagaaatcgtcattgatcttgatcctccgtcaaggaatgattttcctatggcagtggaggctgcgcatgtgctgaaacagctgtttgactcattaagcattacgtcattcccgaagctctccggaaataaaggcattcagctctacatcccgctttcaccggaagcattcacctatgaagaaacccgtgcgttcacaatgctcatcgccgattattgcgtcaggacgcggccggatctttttacgacagagcggtttatcaaaaaccgaaacggcaggctctacctagattacttgcagcatgccgaagggaaaaccattatcgccccctattcgacccggggcaacgaattgggaacggttgcggctcccctttattggagtgaagtcaactcctctttaacacctgatgattatacgatcgatacagtagtgaaccgcgtcaggacagagggagatccgttttatgatttttaccggaatccgcaggacggcccgctttcaatcgtgcttgagcaaatcaagagaaagagctgacgctttttgtcagctcttttcagtctgatacgtgcacatcaatttttctttggaaataaataaatagcaggagtaaggaatgtttttgagggtgagctgttttgcagtaaagtataaaatcggaatatgggccgctttcttaaacagcctgtagcagccgctggacggttttatcacatcaaaaccgagtctcgcagctcctttatgaagcattgtaatgccgacgactcccttaatctcgtctttccgtttatgctggttaatataatccgctaaatgaggcatggattgatataccttctgatatagcataatcccccttctgaccgcgctttcaataggctgcagctctttcaggagtttgacattatgaagatgaatcttaactaacacgtcgttttttttaattctggttccgtcgctcaggatgacttcttttcctttatatctagtcaaacggacgcggaatacattcgattgccgtttatcaatcagcgtcagccgggtaaagaagaaataaagcggatcaagtaagtaccatatagacagcagacagcttctcacatgttcaccttctttatattcaaagcaccctcatattttggcatggggcatgtcacattatgattggtaaataatgatgccgacctgtatcagcttatgcaaaaaccgcttcaggctctactgtccggaacagaaaaaaacactcttcgtgaagaagagtgtctgtatccgctttcttttaacggaaaagcaaatgctggctgtgaattcccgcttttttcagtaaggctatcagctgttcctgttcctcaggcataagtcctgaaaacgctctcgcaattctcaatgaatgaatcggataaattttatccaaatactcgtttcctttatcagttaaatgggcgtaaacagaccgtttgtccttagggtcttgttctctgaccaaaaacccgtttctttcaagcttgtcgatgacataggtgacattcccgctgacaagcaaaagacgcgacccgatttgctgaagcttttgcggacctctcgtatagagcagctccaaaacggcaaattcagtcggattaaaaccatgttctttactgtcgcggatgctgtgttcagacacacttttgaaagcccttgcaaaaactttgtacaaattcatcgaacgcatcacttcttcttcgttaaatgataatctcatcatatctaccccgtatttaagatttttataaaaaaataatgtaaacccttacaattcataagagtcgttctttgttttatattctattcgtgccgtttttcagaattccttcttttttatataaaaaaatacccttatacatcatttaatttgtataagggttccgttctttatagggaatgttccgaaaaaaatacgcgtattcctttctcagctccgtaattgtcatggaattgagtatttctttcgtatagactccgatctgcagaagctttttggaataatggtttctctctttgtccaatgcattttgaagcaaacgactcatagcggcctcctttgttttccgttattctatgatcagaataacgcttttatatcaaagacgtataaagccattgtaaaacttctgtagattatgatgtttttcggtaaagtccgttctggacggctctgagcagcggaaaagcgtgttccccggcaagctgcatgaacgcctccagcatttcatcgcgtttcatatctaattcaatgatttcttttgccagcgaaaccgctttttctttctccattcctatccttcctcctcattgtgtctgtacagtaagcataaaacggggcacagaaccatgcattaaccttgtcaatttttctgccgctttttttctaaaattttctattccgcgtcagaaaacctgacaagcgtcaggttttttctctttttttcttatataatatgagtaaaagacatccaggggtggaaaaatgacgacagacgaacaatcttacaaagataaaaaagtaatctcgatcggcattgtaagcgaattaaccggattgtcagtcagacagatcagatactatgaagaacggaaattaatctatccgcagcgttcatcacggggaacgagaaagtattccttcgcggacgttgagcggctgatggatattgccaacaagcgggaagacggcgtgcagacggctgaaattttaaaagacatgcgaaaaaaagaacaggctctcaaaaacgacccgcagctccgcaaaaaaatgctggaaggacagcttaatgctcattttaagtataaaaaccgctgatcaaaaaagtccgcctcctgtgagacggactttttttataaagcatgaagaaatgcagttgcaatgccgaaataaattaataaggacaaaatatcgttcagcgtcgtaatcagcggtcctgatgcaatcgccgggtcaatgttcagtttatgaagaataatagggacgatcgttccggccatcgtaccgataatcaacgttgcaagcagcgatgaaccgacgacaaaaccgagcgttaagtctttctgccagacggttgcgacaatcgtaatcgcgatcgcacagacgatgccgatatagataccggttcttaattcacggaaaatcagtttaaagatggtttttttattcatttcttctttagccagtcctctgatgacgacggcgagtgactgtgtgcctgtattacccgtcgttcccgcaatcatcggcatgaaaaacgcgagggcgacgactttttgcaatgtatcttcaaaataattcagaatgcttccggaaatcaatccgataaacaaaagcagaatgagccacggcaaacggcggtacgccgcaacgtacgctttcgtatcaaatgtaatcgccttaccggaggctgcgaatttttcgtaatcttcatcggcttctttaatcacgacgtcaataatatcatcgacagtgacaataccgacaagcacatgattttcttccacgatcggaatggctaaaaagtcataccgctggatcagccgggcgacttcttcctggtcttggagcaccccggccgagatgacacgcgtaaacatgagatcctgcactttatcctcaggctcgccgagaattaaatctctgtaagagagcactccgacaagctgcttgctgtcattaattacgtacaaataatttattgattctgcgatttctgcaaagcttttcagcttcacaaccgcatcttttactgtataatgctgcggaatccagacgaagcggttcgtcatcatccgtcccgccgattcttgcggatagttcatcaaaagctgcacggcctttgattcctcagcctccatgctggataaaagctgttctttcagttcttcatccatctcttccagcaatgcggcgagatcgtcgttatccattttattcattgcgagagtggctttcgttttaccgactttatgcaaaacggcaagctgaaattcccgctccagctctccgatcatgtcggtgatgtcatcaaccgtcatatatgacagatagcgggcccggtgcttttccggcatttctttaaacaaaaatgccatgtcatagggctgaagctcatctatcatgtttcggaattcttttatttttccgtcccgcaataaaatgataatgcgtaatatgagttcgtcataggtcatgttttggaccatcgggactcgtacctcctttacggagacgcgccgtccgtcaagggaagtgcggcggtttgtctcctcatcatgtcgtcactggttatctggctgtatatgggtacttcttctgacatactcgaatggggagaatccatactccgcacctccttatcatgctcagtcgtgtacgttttgaggcataaaaaaaaccttctgatatgaaggcgaaaacaagcacggcaaataaacgtgcggggcctccaatcgtagagctttagcactgtatggcataggacagccatccagctgcgttaagaatcaccttatgtcgatgattcctgttgacccattggcgtctttggacatttttgggcagcagcgtatctccatacaggagcctcacctaacgaagttcttatttgaattgacacactgagattacagaaaaaaaaggaatgtgtcaaccttaaatttgtgatttcagcacatgcctataaaataaacggaataaaggcataaagcccttattccggcaaatcgctttcatcctcttctgaaaggaaatgataggattcatgcagcatgagcgcgtactccccttcttttgtcggatgcggtacatactcagcctcgttgatatactgctcttcccttttcttcatatgacagacctcctgttcaattttagattgtccaaaagaagatccgttatcataggaaaaaaaattacttgcggagcgggacatgcagctatatttttcggatcgtgaaaaagttcctaagcagccacgggcccggtttgaaaccgagcgttaattgccacgcgccgatcgcctgcagtccgaactcccgaacgagaaccattttttcactcatgctccgcacatcctcaaaccacacttcatgcgttcttccattttcatcagtataccggaagtaaggggaacgctcctgctgggaataacggatcactgattgatgcttcatggccgtttccatggcgcgctgattggagatggcggatccgatcgttcccggacggtacggaatcacccaatcatacccgtatagcggaacaccgagaatcacttttcttctcggcaccctgctgatggcaaaattgatcgtttgcctgacctctgtcaaaggcgccacgggtcccggctcactgccggcgtggtgccagtcgtacgccataatgaacatataatcgacgacggctccgattccgccgtaatcatatcccctcagccacggcactgcatcacttgttttcgccggaaccgatatcgttaacgcgagctgatgctctgaaagccgggtttttaactgccggagaaatcctgtgaagaggtccctgtcagcttctctgacccgttcaaaatcaatatttacaccgccgtatccctttcttacggttaaggagacgatattgttgacgagattcgttcttgccgtcggattttgcagcacttgatgggctaattccggactgaatcccccttctgtcagattcgtaatgacggcaagcgggcgcactctgttctgccatgtggtttctattgcggttctgtcgtttaaatcgttaatgatatctccgttcgggccaaaatgatattcaaacaaagaaatcgccgaagaatacggcgcaaaatcattaattagctctctatccgcttcaggcgtccgaatgacataaaattgcagggttcccgcaagatagttagagatatcagggatcttcactttcatacccgcccgcagccggttcggcggaatatccgggtttgcctgcatcagctgcatctgcggcacataagccttacctgcgataacggcatacgtatcattcggctgaaccgtatattcattaagagggattaaaagcgcctgccccggaacgatattcgtttcctcaagcccattgacgcttctgatgctgtcaacagggtatccgtactttctgctgatggaaaataacgagtcaccagactgcactgtatgaacaaacatagatgtcctccgtttccttttgatcaaaagggctctacttatctttatgaatgatcatccggtccgattccaaactctgtttgaagaaaggctgtttacaaatcagacatgatcaactatgatgatgtcatcataaaaaactgtataggaaacgcactaggggtgctgttatcggctgagataaaacatgcggcaggcatgttttgatcccttataacccgatctggataataccagcgtggggaagtgcagattgaccggagcgcagggtttttccccatgcgttttcgttctgctgctgcatattccctcggatatgcagttttttatttttcattaaaaaacgggggaggacaccgcaatatgaaactgaatatgaaccgcctgtaaaatcatctctttcatacatacgactatccgataagaaagcaggagatcacaatgaaaaattggaaaatgagagaaattgtcgtcatgtccgtcatcagtgttgtatttgctgtcatttatttagtatcaactcatgcaagcaatatagcggcaggatttttcggccggatgagctacgaaccgatttacggtatctggtttatcgtctcggtgattgccgcgtacattattcaaaaaccgggagcggctctcgtttctgaaatcatcgccgcgtttgtggagtgcttactcggaaatccgtcaggaccgatggtgattctgatcgggatcgcacagggaatcggtgcggaagcggtcttttttgcgacacgctggcggatgtataccctgcccgtgcttcttttatccggtatgggttcttctgtgacgagcttcatttatgacttgttcgtttccggatactctgttttgaatccgggtttattagccgtcatgcttctcatccgtctggtctcaggtgcgcttcttgccggccttctcggcaaagcaatcagtgatgcgctggcttacacaggggtgctgaacggcatggcgctcggaaaacaattcaagaagaaaaagaaacaggtgaaccaagatgcaggcatctgagccccttctatcggccggccgtcttaccttttcttatgatcaggatgaaaagccgattcttcaaaacgtgtcctttcagctccgcaaaggagagcgggctttattgctcgggccgagcggatgcggcaaaagctcgctcgctctctgtttaaacggtctgtacccggaagcatgcgatggggttcaatcgggaaccgtttctttatacggaacacctctttcacatctgacagagcccgccgccagatccatcggcgtcgtgtttcaagatccggaccagcagttttgcatgctgacggttgaagatgaaatcgccttcggcctggaaaatttgcaatatacaaaagaagatatggacgcaatcatcgatgatgttttggcaaaattggagatcactcatctgaaaatgcgaacgatcgcttcgctgtcaggcggttcaaaacaaaaagtggcgcttgcctgtatcattgcgatggaaccggaactcattattttggacgaaccgacggcacagcttgatccatattccgcacgtgaattagtgcggctgatcaaagatcttcaagcaaaaaaaggcttcggccttctcgttatcgaacatcagcttgatcattgggctccgtggatggacaggacgattgtccttgacgaaacgggtcagaaggtgatggacggagagacggacgttatctttgaaacaaagattgaagagctgatgcagctcggcattccgattccgcgtgtgatctcattgcaggagcacgtcagcattccttttacattgtgtaaagaaaagctgtttcaagaatctgtaccgtctctgcccgaaccccggcccgccgcgctttcggcagaagacgcgctgagcgttcacgggctgtcattctcaagaggagcagacgtcatttttcaggatgtgagcttttccgtaaaaaaaggttcaatcaccgcgattgccggccctaacggaacaggaaaaacaacgctcctttctgccgcggccaagctcatccgtccgctgggcggagacatcaaaatagacggcagaccgattgattcctattctgaaaaagagctgcggcggctgatcggatatgttttccaaaatcctgaacaccagtttgtcacagattccgtcattcaagagctgatgttcggctttgaaagcagcagagccgcaaaggagaaagctcttcagctgttaacccgattcggcctgagacgccatgcctcacagcatccgttttctttaagccaaggacaaaaacgccggctcagcgtcgcaacgatgcttatgcacaatgtgaacgttttgatgcttgatgaaccgactttcggacaggatgccaaaacggcgcgggagtgtatgcaaatgctccgtgagattcaaaaggaaggaacggctgttttgatggtgacacacgatatggaactcgtctcagattatgccgacacgatccttgtgctctgcggcacgaaactggtattccgtggaactcccgacgctttgttttctgataacaccgggatcgccgagcaggcgcatttggctttgccgctgcggtatgaatggatgagacacgacaggaggcggagaaatgaacttgcggctggaggctgttaacccgtcaataaaggcggcggctgtattgttatgcgtcattatgctgtcgtttatttataatccgtacacccctgctttgttttatatcatcattgcgggaggcgtcctctcggcggggcgtgtgccgctgaaaaaatggctgctgttcacgattccgtttgtcattctggccttcggttctttatggacagccgccgtattcggaaacgtcccgacaaccggaagcaacctgctgtttaagctcgggccgattgccgtcaacagtgataacgcggcgctcgggatttctatcgcgtttcgtattttatgtttttccgctttgtcgatgatgtttcttttcacaaccgatccgattctgttcatgctcagtctgattcagcagtgtaagctgccgcccaagcttgcatacggcgttatcgcggggttccggtttctccctcttctgaaagatgaaatcctgatcatccggcaggcgcacagaatcaggggcgcggggtctgattccgggctgaaaggaaagctctccgccttcaggcgcttcaccattccgctattggcaggcgcaatcagaaaggcggaacgcacggcgatcgcgatggaatctaaaggctttacggggagccgaaaccgcacgttttacagaactgttaccgtgcgccgcgccgactggtgctttttcctgctcgtgcttctgttattcggcgcaagctggctcatttcattgttgtttgtataaaaacaggccgccggagtgattcggcagcctgttttgttatgtatgttattgatgataattgagagcctgagcgagattggacttgatcgtaatatctgagaaattaatgccgagctgtacggcggtttgagcgatttccggcctgattccggataaagtggacgtgacgccgatcaatttcagcgcctcaactaatttaaaaatctgatgcgccaccatcgtatcgacaaccactacacccgacaggtcaattaacagatgttcaatcagccgttttgcacatgtgctcagcgtattttcaagaatgaatttggcgcgctccgtgtcaatatcgccgacaagcggcagcagcgccgtccgtttgctcagcgtgataaccggcgagcttaactccaaaatcatttctctttgcgcattcagctgcatttttgagttatgctcggcatgatcgacaaacgtgtaaatcgtaaaatcaaatacttgtacaattaaattctcccatttcttcctttctccctgtgcaaacgaagattcatgtttatcggcaaacgcatcgtaataactgatgtatagtctccggtttctcatgaattcacggaccacatactgtacgggagtatccagatgcttctggtctttcgcaagctcaatcacccactgctcgaactcttctaaaaattcttttttcggcatgatatacattttattaatatgccggtaaaattctttatcctgctccgtcagttcttctgtgatgacgggatttgtcaaagaataaatcgaattcggatccgaatcttccatcgtttcgatccactctttcgcaatttgatccacttgttctgaaaaatagttgtataatgcttcacttatcttcatatctcttctcctttcccatttccaattataccgtcagcggatcatgaatgaaaataaaagctgttaaactatccatttatttgaaattttttagtgcgatagattacgccttttttatgaaaatgcttcaaatgactctttccggccggcatgctctgccataaaatagtagcaacacccttgtatccactcgcaagcataaaaaaggagggcttttttatgaatggtgaaatgcatttgattccttatgtcacggatgaacagatcatggaggtaaacgagcttccagagggtattaaagtgattaaggcgccagagttgtgggcaaaagggtttaaaggcaaggatattaaaatcgcggtgcttgacacaggctgcgacatcaatcatcctgatttgaaagaccggattgtcggcgggaaaaacttcaccgatgatgacgaaggcaaagaagacgcgatttccgattataacggacacgggacacacgtttccggaacgattgccgccaatgattcaaacggcggaatttcgggtgtcgcgccggaagcaagccttttaatcgttaaagttctcggcggtcaaaacggcagcggcaaatacgaatggatcattaacggcatcaactacgccgttgaacaaaaggccgatatcatttccatgtcactcggcgggccaagcgatgtgccagaattgaaagaagccgtcgcaaatgcggtaaaaagcggtgttctggtcgtttgcgcggcaggaaacgaaggcgacggagacgagcgtacagaggaactgtcgtatccggccgcttacaacgaagtgatcgcagtcggatcagtctcaatcgcccgtaaatcgtctgaattttcaaacgccaacaaagagattgacctggtggctccgggagaaaatattctctccacccttcccaaccataaatacgggaagctgacgggcacttcaatggccgccccgcatgtgagcggagcgcttgccttaataaaagggcttgaacaggacgcgtttcagcggacgctttctgaggctgaagtctacgcccagctcgtgcggcggacccttcctttggacatcgccaaaacattggccgggaacggatttctgtatttagacgcgcctgaagtactgatggaaagagccgaacaggcacagctgctgtctttctgatatttttctcatataatgattgatcagcttgtcatatcaccaatttttaaaatgtgagattttctattgacagtggtctgaataagctgataagataaccaacaaatgatgtaacttttcaaaaaaatttaaatattttctcttatcgagagttgggcgagggattggccttttgaccccaacagcaaccgaccgtaattccattgtgaaatggggcgcgtgatttttgcgccgagacgactgtctcataaggcacggtgctaattccatcagacgtgatctgagagataagagaggcttgcattttgaagttaaagcctctttctctcatgagaaagaggcttttttgttacatctcacttaaaggaggaaacttaatgacaacaatcaaaacttcgaacctcggttttccgagaatcggcttgaacagagaatggaaaaaagcgcttgaggcttattggaaaggaaacactgacaaagaaacgtttcttaaagaacttgacggtttattcttatcagctgtcaaaacacagcttgaccaacatatcgatatcgtgccggtctctgatttcacccattatgaccatgtgcttgataccgccgtcagctttaactggattccggaaagattccgcagcatcacggatcccgttgatacatactttgcgattgcccgcggtgtaaaagacgccgtttccagtgaaatgacgaaatggtttaataccaactaccattacatcgttcctgaatatgacgaaagcattgaattccgtctgacgagaaacaaacagcttgacgactaccgccggatcaaagaagaattcggagcggaaacaaaacctgtcatcgtcggtccgtacacattcgtcacacttgcgaaaggatacgaagaatcagaagcgaaagcgattcaaaagcgccttgttcctctttatgttcagctgctgaaagaacttgaagctgaaggcgtaaaatgggttcagatcgatgagccggcccttgtgacagcttcttctgaagacgtccgtgccgcaaaagaactctatgaagcgatcacaaaagagctttcaggactgaatgtcctcctgcagacatacttcgattcggttgatgcatatgaagaactcgtttcttatcctgtacagggaatcgggcttgacttcgtacatgataaaggcagaaaccttgagcagctgaaaaagcacggcttcccgaaagataaagtgctggcagccggtgtggtcgacggccgaaacatttggaaaatcgatgttgaagaacgccttgatgcagctctggatatcctcagccacgctgatgttgaggagttatggattcagccttcaagcagccttctgcacgtgccggtggcgaaacaccctgacgagcatcttgaaaaggatttgctgaacggcctgtcatacgctaaagaaaaactggcggaactcggcgtcttaaaagaagggcttctgtccggcaaagcggccgtcagtgagcagatcgaagaatcaaaaacggcacttaaggctttaaaagcattcgcaacaggagcgaactcagctcaaaaagaagagctgaatcagctgacggaaaaagatttctcccggccggcaagctttgaagaacgattggcgctgcagaatgaatcactcggtcttccccttctgccgacgacgacaatcggaagcttccctcaatctgccgaggtgcggagcgcacggcaaaaatggcggaaaaaagattggacggatgaacagtaccaagcctttattaatgcggaaacgaagcgctgggttgacattcaggaagaaatcggcttagacgtgctcgttcacggagaattcgagcggacggacatggtcgaatacttcggtgaaaaactggccggattcgcctttacgaaatatgcatgggtgcagtcttacggttcacgctgcgtacgtccgcctgtcattttcggagatgtcgaatttatcgaaccgatgacggtaaaagatacggtctacgcccaatcgctgacggaaaaacacatgaaaggcatgctgacgggacctgtcaccatcttaaactggtcattcccgcgtgtggatatttcaagaaaagaaatcgccttccagatcgggcttgccctcagaaaagaagtaaaagcgcttgaagatgccggtattcagattatccaagtagatgaacccgcgctccgcgaaggactgccgttaaaaacgcaggattgggatgaatatttaacttgggccgcagaagcattccggttaacgacgtcttctgtgcaaaatgagacgcagattcatacgcatatgtgttacagcaactttgaagatatcgtagatacgatcaatgatcttgacgcggatgtcattacaatcgaacacagcagaagccacggaggatttttagaatacttgaaagaacatccttacgtgaaaggcctcggactcggtgtatacgacattcacagcccgcgtgtgccggcaactgaagaaatctatcaaattattgatgacgcgcttgaagtgtgtccgactgaccgcttctgggtaaacccggactgcggactgaaaacaagacagcaggaagaaaccgttgcggcattaaaaaatatggtcgacgccgcgaaacaggcacgaaaaaaacaagctcagcttgtataaaaaaacagccatccgcaaatcgcgggtggctgttttttctgggcgtgctatttattcttcagcgccttcgcaagttcacttagtgaatcatgctgcttaatttgatagccccgcccttctttttgcaaataccctttttggcagaattgcgtcagcacatgcaagagatgacggtaagatacacccaaataatcacagaccgttacgtgcttctctttataaacccctttataagccgtctgcaaaataaaatcagcaagccggttttcaagcgggaacgccagactttgtgaatatttcgaagccataagcgttgccttagcacttaaaaacttagccagctcacgcaggaatttcgcatcctgcagcaattgcgcgcggcagcggtaaataggcagagcaaaacaaacagtcttcgctgaggcttgaattccttttgtgtaatacacttcatgtaatagttccatctctccgatgtaatcatttttgttgataaaattaattaaagaaactttcccgttttggtgggttacatatattttcgcttttccttcaatcacgtaaaacaggaagtcaggcctcctgccctcttgaataatccattcgtcccgctcatattcgcgcacttccataaactcttcagcggggaaagagaataaatgcgcgattgagtgtttttctaactgatgccgctttttctcgcctttataaacttccatcgtccaccccaaaaatatgagatatctcatattgtctttatgtctttacatgataacatgccaattaaaggaggaacgggaatgaaagcatatcgctggatgagtctgcatttttttagtttttttatgacatggggtgtttttctgccctattggacgggatggatggtgcatataaaaggggtttccgtatccgaagccagtttcattatgagcctgggcttggcggcaagagggatttccacattatttttcttcccttatttatcaggaaaattcagcagcaaagccttattaaacggcgccagaaccgggacgcttctcgcacttttatgttatattcccgctgattcttttcaaagcctgcttcttgtcacattagtgctgcatgtgttttaccctgctttaatgcctgctttagacagcgcttgcggcgtccttgtacagcataacgaattaaaggcctatgggacaagccgacagtgggggtccgcgggttttgtttcagccggcgtcatcctgtccgtctttacaggtatattcggagatcaagcgattttatgggcactgcttttgggcaccctgatattcgcatgcctcagctttatgcatgcgccagctgttctttcaaaacggccggaaacagaccgcgcaagaaaagagggcatgtttgctttattccgcatcaaatatttcggtctggtgctcgcaatcgttatcttactgcaggcggcacacgcgtcttattacaattacggttatctctttttgcaggaaatcgatgcccccgcatatgccatcggaatcattatcaacatcgccgttatcgcggagattatcttctttgcaatcgctgaccgatactttcatcaatttacggcaggctctttgctcgccttggcggcgcttggtgctaccgtacgctggatactcgtatttgcatttccgcatgtcatcattttctgtattgcgcagacgctgcatgcctgttcattcgcgatgggacactatgcatttatgaaatacttaattaaaaatatttcacccgcgcaaatcccgaaagtccaaggcatatattcagcgcttgctctcagctggagcactgcggtatttactattttcggaggttttttatatgaaattgaaccccggtatgcctttatcggaatgattgtttgtacgatcccatccatgcttctcgcccttttatacagaaaacttgaaatgaaaaagagagtttttgcaggaaacgcacaagatatatagccatcgctttatagacgatcacatgtcccgctgtcattttgaccgatttgcgaatgctgtgcgatgtattttctctatatttaaagtatttccttcatatatgatgaaatcaaaaacagcggtataacccgctcaattggttaatgaagggaatccattcagaaacttggacagaatcagtgaatatactgatacagtactgcttacgctcatttcggggaactttgttcgtaataaaatgattttcagccaactcataaggagggacattgtgtcacagcctaatttgcccaatatcacccctgtcgttacactttccagagacgataccattaaccttcttctttcgtcaattgctatggaagagctgggaatggcacatattctgaatgcggaaggggaaaaaatccaatacgcgctcggaacgattcccggattaacagggcccccgtcaagtcttgcggatattcttaacctgaatgagagcgtccgggatacgcttgacagcttaatgaaacaggagcttcttctcggttcaaaattggacagtatctcaaatatccctacactggcgggaccgactggtgctacggggccgacgggaccgacgggagcagtcggaccggccggagcgacggggccaaccggatcgatcggacctacgggggtcaccggtgcgggccttcaagggattgttgcttttaatccgctgattgcccccacttacacaaccggacaggttgtcttgtataacggaagctcttacgtcgcaaacgtaaacagcccggcgggaacccctggagcctcagctgactatacacttttagctgcggcgggaagcaccggtgctactggcggtaccgggccgaccggaagcaccggcgttactggcgacaccggaccgactggaagcactggcgctactggcggcaccggaccgaccggaatcaccggaacaagtctgacagcaacttccggctatgcgagcaatacgggcggcggtgttgtcgcagttattgtcggcggcacgaccatttccttaccgaatgaacaaaacctttcggcagatattacggctaatgccgcaaataccatatttaccgttgctccggcaggacggtactatatttcctaccatattaatttaacggccggcttgcttgtaagttcgcgtattttaatcaacggcactcctcctgcaagttcgattatcgccccggtcgcgtctttggcaaactttaataactcctttattgtgactttgccagcaggcagcaccatccagcttcagctgttcggattattgggtgcggccacattgcttggaggaagcgtcggtgcagctttaaacattattcgattatcttaatggaacatgcaaaaaaaggatcaggcgtttgtccgctgatccttttttaattgagacagaagttctttcgcgggtttaaattgaggattgaacttcacggattttttggcgtaagcgatggccgtcatatcatggtttaatgcagcatggcatttcgccatataataaaaggctctgaaatcggcggcaccttttaaaatgaagtgatcagcattttctccttcaacctgcgttccgttttcaaatgctttgattgccgctctgtacttttccaaatgatataatacaaggcctttataataatgaagattgctgtaatcaggatatagcttgagcactttttcaatcccttgttcggcttcttcataccgtttgagctcaagcaatattgtatatttcaaataatacaggagagacggaggcattcgtttttcgcttaaaaattgaaaaattgagccgttgacaagatgtaatgctttttcatagtctttgattctgtagcattcacttgccaaatgatagacaagccacggatcaggattttcctctgaaagctcttcatttaaaatgctgatattccgtttatgtttttgcttgatcttttcttcctgctccaagtagccgtagtgatgaatcacacatgggagcgtgaaaaaagcattgttttcttcctcattggaagccgagatattctcgtgaattctgccttgatacagaaggcctttatgattgcggaacagtctcggctgcatgctttcaaacgcttcgttttcatcgagctgcttccccgtataattgatgattttcaaaaggccccggctcggtaatccgtcatgaagcagcgaagttaaaaaacggcccgtctcctgatcgagctcttcatccgcgtcaagcactaaaatccaatctccttcggcatgctgcagggcgtaatttctggcctttgcgaaatcattctcccattcgaaatcaaacactcttgcctgaaagcttttgcatatatcttttgtattatcttgtgatccggtgtctgcgatgacgatctcatcagcgatgtcttgtacacttgataaacaacgggagatgtatctctcctcgtttttcacaatcatgcaaagagtcagtttacattcagcatttccgctcattttctcacctttcccgattttggagttgttgattgaaccaaggccgttcaggagtgccgttcatcgtgatgatgacaggccgcacccatctgacggcaggttcggcagtttccgtattccattcctgaagctgcctgacagcccgcttcgtaatcggatgcgcccggaattcgcgcgggctttcagaaatgaattttttcgttcgttccgtaactgtcttcatttcaagaaagtgccgctcatacatctgcttctgctcttcttccaagctgatcattaaaaacagacggccgcctgtttccatctgccagcggcacaatgcggagaacagcctgatttcttctttgtaatttgaaccccttcttttatccacggtcacagataatatatgtaacagcgccatcgtgagacaatgcatggcttcaaaagatgcgtgtttcgcttttgagatgcttggatacggcatatgcttcacccgtctctttttttatgaacgctccccgccttttttcttccaaccgcagtcctcacaatccccacactcacagcagccaatgcggccgtaaaacaggccgtcacacggatcttccggatcactgggatcgtctggattccacgggtcatcaggatcgcccggatcactcggattgctcgggtcgtccggattccacgggtcatcaggatcgcccggatcactcggattgctcgggtcgtccggattccacgggtcatcaggatcgcccggatcactcggattgcttgggtcgtccgggtccatacagacttcagaatcctgtaagaagataatgtcctcaagcttcgtctgcaaaaggagttgtgatttcatgacggtgcgcaggagccgttcagtgcttctattaattgatgacaattcctccaaggagggatcgccggaagcgccgagaaacatttgaatcctttccgcttccgcctgcagaatatgggatagtccgatttcttccatagccacggatgaaagaaggaggttcagggtctcacatctggagagtgtaatgtcgggggtgatgttcggtatgtttggaagagacatcgatttctccctcttttctcttggtgtcattatgcaaaagtgctatatcgtattcttattccgggagagaagagatcattactgatgttttcgttaataaaatatcccggatataaaatccgggatattcgttcgttgatttattttaattcaagtttgacgtctacatttcctcttgttgcttttgaatacggacagaactcgtgagcggcgtgcactagcttctccgccgtttctttgtcaagatcttttgtatcaatgacgagcgttacgccgattttgtaacctccgtcactctcatcttttaaaaggctgacctgtccttcaatttcagaggtcatgtcgattttttgtttttgggcggcgagctcaagcgctcccccgaagcaggcagcatatcctgccgcaaagagctgttcagggtttgtgccggtttctccgtctttttttgcattcggcatgatgatgtcaaaatccagcaccccgtcttcggatttaatatgtcctgctcgtccgccgactgcggtcgcttttgaagtaaataatgccattattatcagcctcctcattgtacttactgtatatattgcccctgctcatatttttaaacatgattggaataggaaatgggccgtttttcggctacaataggggtaacgttaacaaacaaagagttggtgaaagaagtaatggcagaaaaagattttgaacatatgaaactggagaatcagctttgttttttgctgtacgcaagctcaagggaaatgacgaaacggtacaaaccgctgcttgataagctcaacgtaacttatccccaatatttggcgctgcttttattatgggagcacgaagaactgaatgtgaaacggatgggtgagcttttgtacctggattccggaacgctgacaccgatgctgaaacggatggagcagcacggaatcatcatgagaaagcggtcggctgaagacgagcgatccgtgacgatcagactcacagatgaaggacgggccttgcagaaaacagcggcggatattcccattgccatgctggaacagacgggacggtcaaaagaggaattaaagcagttaaagcagtcgctttatgaggttttgaatacgctgcacggcaaaaaataaggatgccccgaatgggcatccttatttttattctgctgccagaagcttcacttcaatatttcccgctgtcgcttttgaatacggacagacaccgtgcgctttttggataagggcttcaagctcctgtttatcaatgccggatgctttgacctcaagcgtaacgcctagtttatatccttggtctgcttcatctttcagcagactgacatgcgcagtgacctctgtttcaatactcagacgctcttttctcgctacgagctgaagagcgctgtcaaagcaggctgaatatcctgcggcaaacagctgttcagggtttgtagcatgttcgagcttttttgctcttggcgttcccggcatggcaacatcaagattcagcactccgtcagaagacgtgactttcccttcacgtccgccggcggctgatacggttgcagtaaataatggttttgtcatgtgaattcacctctgttatattgtgtacaatttaattttacacaatataatagagaccgtcaatctttccgcataaaaaaagcctaccctttttgaaggataagcttaaaagattatacgcggatttgtccgtttcctttgatgatgatttttgtagatgttaacgccggaagccccatcggccctctcgcgtgaagcttttgcgtgctgatgccgatttcggctccgtatccgaattcaaaaccgtccgtaaaccgggttgaagcattatgatacacggcggcggcgtcaacggcggtctggaagtaagccgcatgctcggcgttctccgtcagaatggcttctgaatggtttgtgccgtactgctgaatgtggcggaccgcctcctgtacgtcctgcaccgttttcacactgagaatcggcgccagatactccgctccccaatcggcttcttctgcttgtttcgcttgaggctccagtctgcaaatcacctggtctcctcggagctccacccctttttctgtcagctgattcagcagctttcgtccgtgttcttcggcccatttttcatgaatcaaaagagattcaatcgcgttgcagaccgaaggacgctgtgttttggcattgatgacgacctcgcttgccatttgaggatctgctgactcatctatgtacacgtggcaattgcccgctccggtttctaaaacgggtacggttgattccctgaccacaagatcaattaaatttttaccgccgcgcgggatcaatacatccagcccgtcatttaatgtaaagagctgtttggcggtttctttgcttgtatcttctatgagctgaacggcatcaatcggaagctttgacagccccagtgcgcgtttcatcacactgacaagcgctatgttgctgtggatggcggaagaacttcctctgagcacaaccgcgtttccggttttcaggcagagtgtggccgcgtctacggtaacgttcggtctggcctcatagatcatgcccactactccaaggggcacgcggattttttcaatggataatccattctctttttgaatggtctccagcgattcaccgacgggatcttcaagaccgatcagcagttccacggcgtccgcgatatcgagcaggcgtttttcatcaagagtcagcctgtcaataatgtcaggtgtcagtcctctgttccgtcccgcttcaatatctttctgattctctgttaaaatcagccggcgttcatttctgagtccgtctgcaatacattggagcgcttcgtttttttcagccgtcgttttcatgaccatttcggcagccgcttcttttgccaaggctgctttttgcaatacttcactcatttgtgttccccctcgtcaaataaattcacccaatcatctctgtgaatcacttccacctgcttcgttcctgaaagctggtcgctccgcttccctttggcttctaaaatttcatcggatgagtactgcgtctgccctttgccgataatgccgccgggccctttgacttccactacggcccctttcggaaaactgccgcagacatcggcgacgccggccgggaggagacttgacccgttatgaatcatcgcctgctccgctcccccatcaatgatgatttcccctgatatcggagaatgaaacatgatccattgccgtgtattatttactgaggacaggtctttatcgccgatataagtgccgtcgccttttccgtctaaaattcccatcagtttttcccgtccggagccggttccgataaataccttcaccccgagcgacaatgcggtctgggcggcgagaagttttgacttcatgcctccggtgccgacctttgagcctgctgatccggcatatccgagcaattctggtgtgatgtcattcagatagtcgaaccgctttgcgtccgggttttcattcggattggcatcgtacagcccgttaatgtctgtgagaatcattaattggtctgcatgaatcaaaccgcttacaagcgccgacagcatgtcgttatcaccgaacgtcagctcttcgactgatgtggaatcattttcattaataatcggcacgactccccgctccaacagttccattacagtggcataggcatttctgtaccgctctctttttgagaaatcatttcttgttaataaaatttgtgccggcgtcagaccgtatctttttaaatggtccatatattgctgcattaaaagtgtctggccgactgcggcagctgcctgctttccttttatcgtaacgggtcgcgacggatagccgagagcggaaaaacccgctgccaccgcgcctgaggtaatgaggatcacttcatgcccgttttcttttaataaagaaatggcttccgtatgttccttgatttttgcttcatcaatacttccgttactgttggtgagcgagctgctcccgattttcacaacaattctttgttttttcatcgtttctcctccgtggcaatcaatccaaaccggctctcgtcaataaaaaaagcccattccgtcctgaaaaataaggacgaaatgggctttccgtggtaccaccttgtttgaacgcgtttttcacgcgtcccgctttcctgtaacgccaggttatcgcgcctgagttttcccctcaggactccaaggcaggttcggcaggtttcatgcggcaaaatgtttcagcgggccattttgctctctgtcacagaaagttctgcgtactgatcctcttcaacgctcaatgatttttttatattatgcaaagaaaacaggttcttgtcaagacattttcatccataaaaaacagtccgcctccccggcggaccgccattaattaaatacgatcgttttgtttccgtgaacgatgacgcggtcttccagatgccattttacggctcttgccaacacgctccgctcaatcgttctgccgatattcttcagatcctctgcgtgatctctgtgatcgacgcgttcaatatcctgttcaataatcggcccttcatcaagatcgtccgtcacatagtgagaggtcgcgccgattaatttcactccgcgctcataagcccgtttatacggattagcgccgataaaggccggcagaaatgaatggtggatgttaataatccgattcggatgggcagatacaaaatcagacgtcaaaatctgcatgtagcgggcaagaacgatcacatcaatcttataccgctccagcagctcaagctggcgccgctccacttcggcgcggatgtctttgttagctttcatgtaatggaacggaatattcagcggttcgaccacttctttggcctcttcgtggttgctgatgacgaccgcaatttcggccatcatattgccgctttgccattcccaaatcagttcatgaaggcagtgcagctccttcgatacaaagatcgccacccgcttcagctcacttgccagagacaggctccatgtcatgccgaatgtctgggcgattgaggcgaacgcctgctgtaagtcttcttttttctcacgaatgcccttgcagtcgaattcgatcctaagaaaaaaccgtccgccttcagggtcagtcgtgtattgatttgattcaataatgtttgcgccatgttcaaacaaaaacgccgacacggccgatacaattcccggctggtcggggcagctgacaagcaggcgccctttttcctcattcccgcggcggtattctttcagccgctgtgtcatatatgaattcatctgttttaatccctcgtatcttcataattcgtaacttactaatagattatactgaagatttgataaaaatcaatttacgaaagaattttcagccctacggcagcgcataaaataagcgcaatgaaaaagatgcgcttcgcatccttctgctcgccgtagaaaagaatgccggctaatgcgccgcccgccgtgccgataccggtccagatcgcataggccgtgcccatcgcgatcgtctccatcgcataagaaagcagggaaaaagaagccgcaaatccggcgataatgaaaagaatccatttgactttcttttctttttgaaattgattcattaaaatgaccccgagcatttcacaaagacccgcggctatcaggctgatccaatgcattacgccttctcctccttcgtctcaggcttatcctgtgtgaccagctttaatccgatgacaccgatcagcaaaacgccgatcagcacgattttcaccggatcggcctgctctttgaaaagcaggatttcactgagcacggtgcccgctgtcccgagtccggtaaagaccgcatataccgttcctacgggcaggctgtctgtcgccttgattaatagataaaaactgatgatgattcccgtaatcgtgccgctccacgccagtgccgaatcagcatgtttcaggccggtgacccataccacttcaaatacggccgctatgaccactaaaccccatttcatgttcttcaccctttctgtatccggacaatacaaaaaagcccggatagtcgtctcacatgagattgactctcccgggcttttttccctccgtgtgcatatgcgggatatgtccgcatatgtgttttctctcggaccaggccatgtataaacatgcggaaccctagaaaacatgtctgttcgtatcatactacatttcgccgaaacgttcaacgtcagatgtgatgtcaaaaaccgtcagctgtctctcccatttggtaacggtctcaccgggcaccatgccgattttttccgcgacacggacggaggcagcgttttccggatcaatcagcgccgctatgcgtccgtattgctgcgtatgaaaaccatagtccagacaggcgttcgccgcctctgtcgcatagccgcagccccagcggcggcggacaaacatatagccgatttccatcaaagtgtttccgtttaccgtctgcggaacgattccgcattgaccgagaaatgcgcccgtctctttatcctctgcgatccaaagactgacgccgtatcctttggccaatcgtttgttccaggcaatccattccttcgtttcccgtctgcttttaagagaaggataatatttcatgacctctctgtcggtaaacagcccgtacaaattttcttcatcgtcatcccgcatagtccgcagacggatacgcccggttgtcaggatggtgccggaagacttatgtttcatcatgcacgccacgtctcctttccctgtaatagattatggatccggcaggaaaagtcctttctcagcataaaaaaaccgcttttaaaaaaagcggtttgatgattaccaaggtttatctgttccgagcgcctcggccagggccttgctgtgttttaagcggttttttcgttctccggcgcgctgaacggccgtattgtgaagcatgatttcttcctcggtttccggcacgatccgcggaacgggtaccgatttcccgtttgaatcaagcgcgacaaaggtcagaaacgacgttgccgcaagctcgcgttcgcccgtcatcagatgttctttaatgactttgacaaacacctccatagacgatgtgccgacccatgtgacgtaagattcaaggcatacggaatcctgttggccgatggggcgcaaaaaatctacagaatccattgaggccgtgactgtttcacaccggcagtggcgggccgcggaaattgaagcgatatcatcaatgtagctcatcagctttccgccaaacagcgtattgtgattattcgtatcaagcggaaaaaccctgcttgttttaacaacccttgtttctttgcaaaatcttgattctggcaacttcatattatttaaactcccctttggtgtctggtcgttttgactcattcatctgtaccctattaaacaatactttgaccgttttgtctaaaattttaaatattaagttggttagatattctctcataaatgtttcattattcatcacatccgggaataataaacgcacattgaataccgataggaggatatcacatggacgtatccattcccaaatccacgcggaaaccggcttgccgcagtgagtttgatgctttgcagacagtcatcttatgccggccggaacacatggccatcaaggatattattaacggaacgcagaaacatttcaaacaagaaaatattaacatacccgttgccctcaaacagcatagcgagtttattgacattttaagatctcatcagattgaagtcgtcctgctgcctgccgatcccgcattgcctgagcaggtattcacccgggatatcggatttgtcttaggcgagacggcgtttatttcaaacatggcggcttcagtccggcagggagaagaaaaagtgtttcaaaacctgcttgacaataagaaaatcccctatacgcgactgaaaaaagcgaacattgaaggcggcgacatcttgatcgcagacggcaccgtttacgccgggctgagcaagcgcacggataaagcggctgtccgggagctgcgggaggcgctgccggagatgacggttgtgccgatccctctcaaggaggatttcttacatttggactgtgtatttaatatgatctcggaaacggaggcgctatactgcaaaaatggcttgcggcagaaagaaattgatcttctcgccgaacgttttgagatgatagaagtgcctgaagaagagcaattcacgctcggtcctaatatcttgtcaatcggcaatcagacacttatcagcctgccgcagcaccgtcatacgaaccgcgagctcagaaaaagaggttatacagtcattgaaaccgagttttccgaaattattaaatcaggcggttccttccgctgctgcaccttgccgcttgtcagaacatcttaaacatttacaaggcagtttccttcaagatacgttaatatagagaagacaagactctaaagggggaaaccgaatggctaagtacataggatacgcgggaacatatacaaaaggcggaagcgaaggcatttattgttttgaacttgatacagaagcgaaacggctcagccgtccgaagctggcagcaaagctcggcaacccgacatacgtcactccgaattctgataacagcatgctgtattccattgaaaaggcagacggaaaaggcggcgtcgcagcctatcagattcatcagaacagcggggaattaacttttgtgaaccaccagctgattgaaggcccgtctccatgccacgtcagcattgatgataaacatgaatatgtgttaaccgctaattaccacagcggaaaagtgcacgcctttcccgtcaatgaagacggaagtctgcgggagccggctgccgaagccgctcatacgggaacaggtcctcatgaaagacaagagaaaccgcatacccatttcgcaggctatacacctgagcataactacattgcagccgtcgatttagggacggatacgctttatacttaccaaatgaaaaacggttcgctcacagaggtgaaaactcactctttcgcaccgggttcagggccgcgccacatcgttttccatccggcggaaaaatacgcctatgtcatgacggaaatcagtaatgaagtcatcgcgcttgaatacaacccgaccttaggtgaattcagagagttgcaggtcatttccgctttgcctgaaggctttacggacaaatcgcaaggcagcgcgatccgcatatctaaagacggcagatttctttatgccgccaaccgcggacatgacagcatcgccatctttaagatcaaccaatattccggtgaattgtctcttattgaatgggtgccgacagaaggcaactggccgcgtgatttcgcgtttgacccttccgagacattccttgtcgcgtcaaacgaagaaacgggaaatctggttttgtttgaacgcgacccggaaacaggcaaattgactctgcttcaatctgacattccggttccgtatccggtctgcgtgtcatttctgcatcaggtttaatcaaaaaagaaagctgactttatattgtcagctttcttttttgtataaatggcaggcgacaaaacgccccgccttcacttcttcaagctcaggcgttatcttactgcatagctccatcgcttcaggacaccgcgtcctgaatacacagccgctcggcgggttaagggggctcggcagctcccctttcagaataatccgttcacgcttgtcctcaagaagcggatcaggaatcgggattgaggataaaagcgccttcgtataagggtgaagcggttcccggtaaagcgcagcgctttctgtaatttccatcatgcggcccaaatacatcacgccgatccggtcgctgatatgcttgaccattgataaatcgtgggcgataaataaaaatgtcagccctttctctttctgaagcctttttaaaaggttgacgacctgagcctgtaccgacacatccagcgcggaaattggctcatccgccacgataaattcgggatgcagagagagcgctctggcaatcccgattctctgcctctgtccgccgctgaattcgtggggataccggctgccgaaatccggatggagcccgacagcttcaagcagttcatccgctatcatcagacgggcttttcttgtattgtaaagattgtggatttccatcggctccataataatttcccttacggtcaggcgcggatttaacgaggcgtaagggtcctggaaaatcatctgcagcttgcggaagaagaccgaccgctgttctgccgcggcacggtgtatatccgtcccttcatatgataccgaaccggccgtcgggtcatacagacggagaataacccttccgagcgtcgatttaccgcatcccgattctccgacaagtccgaatgtttcccctcttttaatgtgaaaactgacaccgtcgactgcttttacggctttctttcttcctgcgtcaaaatgcattttcagcccgctgacttcaaggagcggagatgccgtcattttctattcccccttttcgcttatacagcggcgtacggtgcataattctttttcatagacggttccttccaaagacagcacttcgattgtttttcccgttttcggggagtgcagcattcggccgtctcccagcgccaaaccgacatggtggatcgcgccttttccttcttcataggcgaaaaacaaaaggtcagccggcaggatatcgtttaccgccgcgccgcatccggcttttgcttggtccgttgcatcacggggaagggtatagccgtttgctttaaatatcgaatacataaacccggaacagtcaaacccgaaaccgctcagtcctccccataaatacggaagcccgagaaacatcatgcccgtttcgatgacatcggccgcccgtccttccgtatgccggcactcgtctgcgtcagcttcatttacgaacctttctccgagcggcgtcaccacccggaaaaagcctttctcacgtcctgatgccggaagacgcgttaagaaacttacttccaagtctggttcgccgtttgtgtgatataaaaaagctgtcggtttggtaatccatacggcgggggaagatgcatgaaagccgtcttttgaaagctggctttttttcatccaccccggatatccgcgcacatccttgtttgaaggctggccgggaacggcgacaaaagcccattccccttcctctttgagaatgatcacttcttccccgaaaagcgcttgcgtttggacaaggttgtctgtgcataattgcagccgctcttcatatcccatagacgctaaccattttctgatctgcggcgggttttcgagcatcggcgcatcatacgaacggggagatgacggcagcgtccatacgttggctgctgccgctgtaacggctgctctcatcttttcgccccctcttgtatcgacacaccggtaatgccgagacccggttcgtcgggaatcgcaatctgactgccgctgtatgtgatgccgccttgaatcaaatcatctttcagcataagcggcgcatcaaaatcaaaccttgtcacattccgtttgcccgcggcaaaatgggccgcggcggtgatgccgagtttggtctcaatcatgctgccgaccatgcattccacgccgcacgtttccgccatcgcattgattgtttccgcctgctttatgccgcccgctttcatcagcttaatattaattaaatcggcgcttctcgtctgcagcacgtgaaaggcctgacggggggtaaagacgctctcatccgccataatcggcgtgtctacggcatcggtaacctgcttcagcccggcgatatcgtctttgtgaacaggctgctcgaccagctcaatgccgaggccggcgtcttccatctttcggatcgcggtcacggcttctttcggcgtccagccttgattcgcgtccagtctcagtttgacgtttccgccgacacgtgatctgatcgcccgaatccgcgcaacatcgtctgatatgtcacctatgccgacttttatttttaaaatatgaaatcctttgttcacataacggtctgcatcccccgccatctcctcaggagaattgacgctgacggtaaaatctgtttccagtgtattccgatagccgccgagaagccggtaaagcggctgtccatgcatttgcgcccatccgtcatatacagccatatccaccgcggcttttgcgctttgatttctttccaacagccggctgatatcaaacaaaacggcttccatgccggaaaggctccgccccaagagagcgggcttcagcacatcgtggacggcgctttcaataccggccgcgctgtcacctgtaatgacaaccgtcggcggcgcctccccccagccggtcagaccgttgtcaaaagtgagcttcacaatgaccgattgagcattgtaaaccgtgcgtaaagcggtcttaaacggctttttcagcggcacggacatccgtcccgtttgaatatctgtaatcctcacgcctgatcactcccttccggaaacccccgattcaatcgttaccgctttggccgccgtatccataaccgcgcgggctccgatcggaacagcgaagctcggtgtacaatggccgattttaaagcctttgagcgcgggcttccctgatttaacaatgtaatcgttcagcacttgctctaaagtaagcgacttttctttatgtttcggttcgcattggtgaaaatcacagaccaggattccggctgcgtctgacagttttccggccatctttaattgattcagcattctgtcgatttgatacggctcctcatcaatatcctcgataaacagcaatttgtcttttgtatcaatttcaaacggcgtgccgagtgtggacgtaatgagcgacagattgccgcccgcaagctctccctcggcccttccgcctgtcagcacctctaagggagaaatgtcctccgtataggtaaattccgtttctgtaaaaagctgacgatacgacgcttttgtcaggggatcagcatcttcaagcccgacatcggtgctcagcatcgggccgtgaaatgtgacgagccccgtattttgatgaatggcggtatgtaaaaacgtgatatcactgtatccccagaaaattttcggattgcggcggattaagccgaaatcgatgtcggcggcaatgcggcccgtgccgaatcctccgcacgcgcatatcaccgctttgacattctgatcactaaacatgtcatggagatcatcgagacgcgcccggtcctctcccgccaaatagccgtgacgggtcttcagcgcccggccgagtttcacttgaaggccaagctcattctctaaaaacagcagcgcggtttgcagtgtcccgctctcaggcgggcttgcgggcgcaatcacaccgaccgtgtcgcctttttgcagtgctttcggtttatggttcatgactttttcaatctcctttccggattgaaaagtgaaacacgccgctcctttaacggcaaaagagcggcgtatgtttccgctgtaagatcaggacttttccgcccacttcagatcaatgtaaccgacggggtgccggacaatgcccttcacgccgctgttctgcagatgcacctgattgtaaaagtaaatcggaatgatcggagcctcgttcatgagcagtttttccgctttatgcatgagcgcaaaacgttttttggcatcggcttcctgttttgcctgcttgatgtagccgtcgtatgccgcgctgccccagccggtgcggttcatggaattatccgtctggaaagcctctagaaaactgatcggatctgcgtaatccggtaaaaatgagctttgagagaactggaacttcagtcctttctgctcttctaaaaagacgttccattccatattggcgagcttaacgtctataccgagtacacttttgagcttctgctgaatcgcttccgctattttcttatgctccggttttgtgctgtatgtcaatgtaacggcgggcagcttgtcataatgctcttctgccatgcctttttccagcagttttttggcttctgattcatccggatttaataaactgccgcccgcttcgcggaaatctttcccgtcaggctgagtaaatcccggggatacaaaggcatgtgccggcttttcactgtttttggtcacataatccgtgatttctttctgatcaatcgctgccgcgaacgcttttctgatcttttcattttgaaacggctccatttttacgttaaaacgatagaaatagagtccggcctgatcccacgtgcggacattttttcctcccatcagctgctcgctcagctctgccggcacaaaggcggtatccaaatcccccgactggaacatctgatagtcggtattccggtcactgaccatcgcccatgtgactttatccagtttcactgtctttttatcccaatacgtctcgtttttgaccatcgtcatgctgtcgtcatgcttccattccgtcagtttgaacggcccgttgccgacaaaggtttttgcttcagtgaaccatttcggatcagccttggcgaccttctcattaatcgggaaatacgccggattggacacgacgctcagaaaataatcctgcggtgccgccaatgtgacgacaagcgtttttttatcttttgccgtgactttcacgtcttcttgtttgccttttccgctgttaaattcttccccgcctttgatcatgtagccgagaaaagcggaagatgcgcccgttttcggatcgagcatccgtttccaggcgtacacgaagtcttccgccgtaacgggatcgccatttgtccattcggcgttatcccggatattgaaggtatatgtcagcttatcagcggacaccttccagctttccgccatggccggttcgggcttattatcttttccgagcctcgtcaatccttccatgatgttattcagcggctgccaggaaacattattaaatccgatcggcggatcaagtgaggtcggctcattttcgttattgagccgcagcaccgtttcacccccctgttcttttgctttgccgggttctgtccccgcctgttcattggctgtacagcccatcagagcaaacgaaacaacagcaatcacaccgatcgcccatctctttttcatttcaatccccctttttcctctgctgccgtcagctgctgcttcagccgctctgcacggtgatcctgaagccagcagttgacgatatggcttttggatttcacggttgttgccgggtataccttttcacagacgatcatcctgtccgggcagcgggcggcaaacgggcagcccggcggcggatcgaataaatcaggcggcgtcccgtcaatcggcgacagctcactatcctccatatccagccgcggcactgaacgaagcagcccctttgtgtatggatgagccggacggtaaaaaatatcatgcctcgtgccgatttcggcgattttccccgcatacatgacggcgactctgtcggcggtctgagcgacgacgccgagatcgtgtgtgatcagaataatagacacgcctgtttttctttgaatcttcttaaataattcaaggatttgtgcttgaatcgttacatcaagagccgttgtcggttcatcggcgatcataatttccggctcgcagatcagagccatcgcaatcacgatccgctgccgcatgcccccgcttaattggtgggggtactgcttcaggcgggatttcgagtccgggataccgaccagatccagcatggcgagaacttcggattcagcttgttttcttgccatggcgcggtgttccaacagcgcttctgagagctgattccctatggtcaaagtcggattgagcgccgtcatcgggtcctgaaagatcatagaaatatcgcgccctcggattgcccgcatttcccgatccgacattcggcaaaggtctttctgtttaaattgtatgcttccggattcaatctttgccgaatgtttcggaagaagacccatcacggcttgtgacgtcacgctttttccgcagcccgattcaccgacgatcgcaaacgtttcacctttatataaatcgaagctgacgcctcggacggcttttacagtgcctccgtatgttgaaaaagtaacatgcagattttgaacggaaagaacttgctgcgccatttttcctacctcctcagtttcgggtctaacgcgtcctgcaagccgtctccaagtacgttaaacgcgtacatcgtcaaggaaatgaaaaaagcggggaaaaacagccgccaccaatggcctgataaaatcgccggcagcccgtcgtttgccatgactccccagcttgcaaacggcgcctgaatgccgagtccgagaaaacttaaaaatgattccgcaaaaatcgccgccggcaccgtaagcgtcatttggacaataatggctcccatcgtattcggcagcagatttttcttaatgatccgaaatgttttcgctccaaacgttttcgaagccaatacgtgttcatcatgcttcatcctcagcacctgccctctgacaatccgcgccatgccgacccatcccgtcacggtcagagcgacgataatggaactgagccccggccccatcagcaccattaacaaaatgacaacgagcagatacggcaatccgtagagaacctcgatgattctcatcatggcgctgtctgtccggccccctttgtagccggcgacgcctccgtagatgacgccgatcaaaaagtcgatcagcgccgccatcacaccgacaaataaagagatcctcgctccgtaccacgttcttgtaaacacgtcccggccaagttcatcggttccgaaccagtgtgaaaaagacggcggaagattctgctcggcgagcgtctgccttgtcacgctgtgcggtgatatcagcggaccgaacacagccgatagaaacaggcagcataatatcacaaggccggccatcgccaatttgttctttttaagccgccgccacgcatcctgactgtaagacaggctcggacgcttgaccgactcggtttcaccctttctttccgcgcccggctgaaaccagtcatcgggcacttctgtgtgttttaccgtttcttgcgggagattcatcaggatcaccctttcttatgaagttttatgcgcgggtctaacaggccgtatgccaaatcaaccagaaacagcaagacgatcagaatcacactgtaaaatacggtcgttcccatgatgaccgggtaatctcgctgattgatgctttctacgaaatatttgcccattcccggtatggcaaaaattttctcgatgacgaaactgcccgttaaaatacttgcggcaagcgtcccgagtactgtcacaacaggcataagagcatttttcaatgcgtgtttgatcacaattttgacgggagaaagcccctttgcttttgccgtgcggatgtaatcctgagtcagcacttcggccatgcttgatcttgtcagcctcgcgataatggccatgggaccgacggcaagcgcaacagtcggcaggaccatgtggacgggactcgtccaggtagctgccggaaaccatttcagatgaaccgcaaattgctgaatcagcagcgtagccataataaaattcggaatggaaatcccgagcaccgcaaggctcatggccgcatagtcgagaaagccgccgcgcctgagagcggccattatgccgagcgcgagtccggaaataacagcgatgatgatcgccgttatcccaagctcaaatgagaccggaaacccgcgttcaagcatagcgtttacactgtctgacggttttttaattgaaggaccgaaatcaaaggtaagaatggattttagatagatggcgtattgagtgataagaggttcgttcagatggtagtaggattcgagatttcgctggaccgcttcgtttgtgccccgctcttcgttaaaaggcgagccgggtatcactttcatcatgacaaatgtcagagtggtgatgacgaggacggtcataatcatggcgataaaacgtttgataaaataccgcagcaatgccgttcacccctttaacagaatgttgttctcatggcgagttctgtcatgacgagcatggcctgataggcttccggcatgtcttttgcctgaaattgaacgattgtcgttcccgggatgatttctgtgcccggcattaaatgggcccattcagcctgtccgtagttggcaaattcaatgcctaatacaggtctttcaggcggagtcagcggtttgaccttatctttatttttgagcgcataggctgttttttccgtcaggagccgtccggctttttgaggggacaggcatttgaccgcggttcttgaaatggtttgtttgacggcggcagtcgtcacattcgggatcagctcctccgcttcttttgcggcgcaatcatctccggcagccatgatgaccgggacatcgtaaaatccggcgagataggcatttaaccccagttcaccgaccggcttatcatttatgtaaaagtggcggacgccgaatatcatgctgtgcgacatgacgcccggcatcgacgctctcgcatgatagccgataaacatcacgcccgaatacgattcatcaaggccctgcatcatggaaaacggcttgacatcccccgtaatcagttctgcctcagggtgaagtttttccgcgagcagattattcatctttgagtggctgtcattcacggtcacttccgtgcatccgttattaaacgcttctgcgatgcaccagtttgcttcttcggtcatcagaaccctgccgcgctcataattgtgcatgcgggaattgacaaatgtttcatcaggcagtccggaaatcccttccatatccacagatagatacagtttcatgtaatgcctccttttttacttaaaatttcgatattaaattatgaatattctaacaaattatattaaaaaaggatgaaacatgcaatataccattctgccattatgggaaaaaacaaacccttttcaccgggaaaagggtttgctgatagaaaaagttacatactgtttttgcttatatgatgacgctgaaactgtctgaccgcacttctgtattcatgatcgggaatgacctgatgcctgatcggttcaggagcctgcggcgaagactgttcagccgcctgcttacggacggcatgcggtttatgcgccagcttatgtcccatgccggtcgcattcatgacaaatgataaacacactaaaagcaagcttaagatgaaagcaataagaaacaaatcgctgtatgtccccatcagcaggtcatgcggtgattgtgtgccgcgcgcgccccgaagcgtgccggaagcatctcttttcgtaaaataccctattaaaacaggtgcgcccatataaatgaaaagcctcaaaaactgaactgccgtcatgcgtttcaccagttccggaagcggtccgcccaacgcggctcccatcagtcctgctgccacaataagccctgtcccggccgccagcatcacgaaaagccccgcaaatagaataagcggtatatgatgatccgccgtcatccattggaaattcacgaacaccagtataacagagcctgttatgccgagcatgcccggaccgactttatcatatgctaatgcactgatgacagcggcgatggccacgcctcccaaaaggctcgcataaaggaatatcagttgagtttgtgacatatgatatgcggtctgaagctccccgtgaaatgcagaaagactgaccgctatggaaatactgcccgcagcgatcatgaaaacacccagaatcggctttggaatcagcataagtttaatcgaaatcagcgcatgttcgtttctgtactgcatgatcagcaagatcagaagaatgacgatgcttcctccaaatcccgccaatgtctgccatgatgaaaagccccatttcggcagatgaataaatgtataggcggtcagcacggctgatacacccgctaacagaaaaccgatgccgtcaaatggagatttttcagcatttttatgagcgtcatcccgcagccacatataactgaaaatgaggccgaaaaaagacagcaggccaaaaatgccgaacagccaatgccaatggccggcgcttgccgccgccgtgcctaaaacggttcccataatgacggacccgtaaaatccgccgatcaacacaaataatgcgtaattccggcgctcaatcggaaacgaaagcaccagcatcgggatcataatcatcagcatagtgcccgccgcagctccctgtaaaaaacggcccgcggcgagcggataaatatcatttgtcacagcagcaaggagcgctccgatgacacccgcggccatcgaaatcacatagacaggccgggagccgaatctttttcttaaatacggccccgccggcacgaataaggcaaatgccatattaccgataataatcggatgaaaagagtcaaagttttccccgccgaccgtctgccggacaaggctttggacagccgaaagagcggtattcgacatcagccccggcccgaccgccaatacagcgagcagagaaataatccagtgatgtttttctttcatgtgacagctcctttctgactatttgacaaagtgaaaaagctaacagatctcccccattagcttgacagaattttcatatcttttcatgtgaagaattgaacataatatctcatttattatttcaaatccgatggaaattgtcaatataaagcgccgccgtccgatttcgtctttttcacaatttcccacaatcttttcattattatcccacactttttgtttaagatggagtcagtaataataggcaaatcatgctatgatgaaatagagaaacggagtgaacatgatggataactatcgtgatgaaaatcggacagaccaaaaagaacaggaagtccttttagtaaaagaaaacccgcagacggccggatattccgcgccggacgaggacaagaaaaaacgaagcttcggctggttcagaccgcttctcggcggagtgatcggcggagggctcgccctcggcatctatacatttacgccgcttggagaccatcagactcaagatacttccaatccggctcccgctcaggaaacgtcatcggtaaccgccaagcagacatcttctgaatcagacagcggcaaatcggcaaacagctcatcggcaaattcaagcagcatttcgaatatggtggaagacatttcaccggcgatcgtcgggatcaccaatctgcagaagcagcaaagcagttccgatttattcggattcggatcaagctcagattcaaactcaaattcatcgggtgaagatgcggaaacgggatcgggttcaggcgttatttttaagaaagcaaacggcaaagcgtatatcattacgaataaccacgtggtcgaaggcgcctcttcccttaaagtgtcattatatgacggcaccgatgtaacagctaaactcgtcggcagcgactctctgacagacttggccgttttagaaatcagtgataaacacgtgacaaaaacggcaagtttcggcagctcatccgctctcagaacgggtgaatccgtcatcgccatcggtgatccgctcggaaaagacctttcccgcaccgtcacacaaggcatcgtgagcggcttaaacagaaccgtctcgatctctacgtcagccggtgagtcaagcatcaacgtcatccaaaccgatgccgccatcaatcccggaaacagcggcggaccgctcttgaatacagacggcaaaatcatcggcatcaacagcatgaaaataagcgaaagtgatgtagaaggcatcggctttgccatcccgagcaacgatgtaaaaccgatcgccgaagagcttctcacgaaaggacaggtggagcgcccttatatcggcgtgagcatgatcgacttggaacaagtgccgcaaaactatcaggaaggcacactcgggcttttcggcaaacagctgaataaaggcgtttatattcgcgaagtggcgcagggctcacctgcagccaaagccggattaaaagcagaagacatcattatcagcttaaaagggaaagaaaccggcacgggcagcgaactccgcaatattctctacaaaaatacgaaagtcggcagcaccgttgacgtgaagattatcagaaacggcaaggaaatgacgaaaaaaatgaaactgactcaaaaagaagaaacatcttcttaacaaaaatccaaggcagccgccttggattttttatgtacagcggaaactttaggcctggatcaaccgtatgacttagtgtacaaaggaggatacttacacatgaaacaaacaggacttttgctggtcgttacaggcctgatcttgctgcagctgagcattcagcttcctcagcaaaacgctgcttgaggtatgacgctgggtgcaagcattttactgaactttcgggaaccggactgatcatgcgctctctgcacacgcagaccggccgcagatgaatgaaaaaagccgcgggacattctgtcatcccgcggcttttatttcacataaaagcaccctgtccgctggccggacagggtgtttcggttaagacatatgctggtcccgataaatcttttcgtttttcatgccgtacgctttttgcacgatatagagcggacggtcttttgcttcgtcataaatccttccgatatattcgccgatcattccgagcattaatagaacgatgccgctgaataacagctgtatcacaatcagagaggaccagcccgtaatggtgctgttcgtaaacagcttcatgtataaaacgataaacatatagagaaaacccgctccggacatgatcattcccgcatagcttgccgccttgagcggtttatgagagaacgttgtgatcccgtccatggaaagcttcagcatttttttaagcgggtatttcgtttcccccgcaagccgctcatcacgttcatattctacagcagtctgcttaaagccgacccagctgacgagtcctctgacaaaaggatttttttcttttaatcttttcatctcatcacagacttttctgtccagcaggcggaaatctccggtgtcgagcggaatatcaatatcagtcacgctccgcagcagccggtaaaacatagaggccgtctgtttcttgaaaaaggtttctccctttcgtttcgttctgacggcgtacaccacatcgtagccttctttccactgctcaatcatatcaaggattaattcaggagggtcctgcaaatcggcgtcaatgacggcgattgcattcccctctgcataatccatacccgccgtgatcgcgatctgatgtccgaagtttctggaaaagtcaataattttcactctcggatcaatcagactttgctctcttaaaatctcaatactgcggtctttgcttccatcattgacaaagatcaattcataatgctcttttgtttgatccatgacttctttcaggcgctgataggttgtctgaatgacgggttcctcgttataaaccgggacgactattgaatattgaatatgtctgctcatgttttttcctcctattcatcagattgaagttcgtatagtgaagctgattgattcattccgcccggcccgccgctcattcggctgtttttacccgcggccttgctgctttttgtatcagccggatcactatttttcgttttctgatctgtgcttgattgccatttatctgaagatactttctttccgtttttctcaacccactgcacaatatcgttatttccgcctttgcccattccggatgttaagaagtattttactttcccttcttttacgagctttttaaattgagtcagcgtaatggccgggtcagacccgctgaatccgccgatcgccatgaccgcttttttcgttttaataatgtaaggcgccgccgtgttggaatcggttgcagcaaatagatagtccgctccggcgttgtgtttctctaaatagttgatcagttttgtattgacagatgcgttatccattcccatgccttttccgcttgttgaagcgagctgagggcctgtttcaggcaatgagctgttgcctccgtacagaagcggtgtgctcgcccaataaatcggcataaccatcaagacgagaagggctgcaagtgaaacataataacttagcggtttttggcgctgtttgaatacgaacagggcgattgctgccactgcgccgagaacgcctgctccgatgctccagcctgcgccgatttgatcattgtagtttctgaggataaacagctcaaatccggttgtcacaagaatagcggccggcaatagccaagttttccatcccgcctgcttgcggtacagatgaacgagggcgacccatcccgcaccgacaagtgccgcgatcggaggcgccagcataatgagataataatggtggaaaaattccgccacactgaagaatccggcaatcggcacaagccacgctgcccaaaagatcgtttccttctgttctgctgataatcgtcttctttctctcgccccggcgatcaataaaccggccattccaaaaatcgcaaacggcaggagccagctgatctgatcagataattccgtttggaaaaggcgcagcggaccaggagttcccgttccgaacattcctgaacctgattgcattttcgagccggtgcctgcaccgctttttcctccgccaccgggaccatctccgccgcttggaggacctccttgaccgccgcttggcattttcccgttagatggaggtgccgtcatactgccgttttgtggtttgtctccgcttgctgaactgctgcttgaagactggccgggcggcgcttgcatttgtgaagaaccgccggaagaagacatctctttcgatgcgtttccgtccggcccgccctggccgccgccggaactttgccctgtcagccgctgaatcccgttatatccgaaagccaattccaatacggagtttgtctggctgcttccgacatatggccttttgccggcaggaatattatcaacaatgagcggccatgacaatgaaacggctgctaaaacggctaacgcgcttaccaatgaaatgatttttttcttaatcgtggtgtttgccgcaatcatatagaacagcaagaaggccggcaaaatcatataagcctgaagcatttttgtgttaaagcctgctccgacgacaaaaaatgccgccaaaagccagatcagtctgccttttctgatcgctttaaagagaagccatgtggcgaacaagaggaaaaagaccagtaaagcatcgacattattcgtccgcgcgaccgctactgcgatcggtgtacacgccatgacaaatgaggcgatgcgcgccgccgtttttccgaacgtcggctttattaataagtacatgaatagaactgaacctacacccgccaatgcctgaggcaggatgacgctccacccgtgcataccgaatatcagcgcgctgatcgtttgtatctggtatgtaacaggcggtttatctaccgtgataaacccggctgcgtcaaatgaagcgtaaaagaaattatgaaagctttgaagcatactcgttaccgctgcggtgtaataaggattcaccgtatcgtcattccagatgttgtacatattcaagaatgcggaagcgagtaaaatgagaatgaagactgcgtctatctcgcgttttttcattttcacctgtgttttcactccttttgtttaactttgaacaagtgtaacaaccaaatgtgaaaaatttattaataaacaaagacaattattttgccgtttacaaataggtaaaaagaatgacaaaacgggtaaaaaagcaaaaaaaaagatgcccccgtcaagccgggaggcatctgtcatgatttctgatttactgtatcggtttcagccgtgcttctatttcagaacggcggtgttcgagataaggcgggagcgcaaccgttttgcctagctcttcaggtttttcatcaaccataaatcccggaccgtccgttgacaattcaaacagaattccgttcggctcccggaagtacagcgctttgaaataataacgctctacaatgcctgagttgctgaaaccttctttcgtaatgatgcggtgccataaagcaagctcctcttcattctgaacgcggaaggccacatggtggacgctgccttttccaggacgctcgcgcggaagatcgtttctttcaatcagatggacttccgtgcgcgcgcctccgtttccggattcgagcaccgtaaccgtgccccggtcttcatgcgtttctttcccgatttcagtgaagccgagcacatcggttaacacacgcagcgtcggttctgcatacgggacggtcaattcaacgggaccaagaccgcggaaagaatattcttccggtatgccgctttgcttcaccgcttcaccgatgtcttttcctttttcgtcagctgtcagcacaagccgctgtccttcatgatcccaaaaagcgagtgtctctctgcccgctattgtcatgatgtcgccatgagcgacctgatgctcttcaaatcgttttttccaatattgaagcgcttgtgcatccgggacacgcaggccgattgaagaaatactgtttgttcccgcatgaaacggtgcaatccgcggaatttcgaaaaacgtcaattccgatcccggattagctgtttcatcaccgtaaaataagtgatacatcgtcggttcatcctggtttacggactttttcacaagcttcaatcccaggatgttccgataaaaatctaaatttttctgcgcatcagccgtcaatgctgatacatggtgtattccattaactttcattatgttatcctccagtcaattatctcgatttcgagatattttatatatacaatttatgttatccggatcgcaaagtcaacccatctgcttcacagacggtctgcagactgtcgctccccaaataacgaaccttcgatattaaaaaaccattaatgttcgtttttaaaacggtattttttccttctcaaaagcagaaacctctatcttttagggaaaacaacaaaatcagaaaatttattttattcgcgtttcagcaattagggtttacaatatggaaaatagttttttcagcatgacgattttacatctggagggaaaggatatgcagattgaagagaacggacttaaaaaagagatcggccttaccatcgccctctcacttgttatcggcaccatcatcggttccggcgtatttatgaaaccaggcgccgtgcttgcctactccggtgatgcgaaaactgcgcttatcgcgtggctgttaggaggcattttgacgcttgccggcggcttgaccgttgcggaaatcggcactcagattccgaaaacgggcggactttatacatatctcgaagaagtgtacggcgaattttggggctttttgtgcggatgggttcaaattatcatttacggccccgccattatcggagcaatcggcttgtatttcggctctttgatggcgcacttgttcaattgggattccggctggtctaaattgatcgggatttcagccgttttgtttttaagcatcattaacattatcggaacgaaatatggcggcatcgtccagggaattacgactgtcggcaaattgattccgattatctgcatgatcgtgttcggcctttggaaaggcgatcagcatattttcacagccgttacaagcagcatgtcggacatgaatttcggcgctgccatactggccaccttgtttgcttatgacggctggattctgcttgcggcactcggcggcgaaatgaaaaatccggaaaagctgctcccgagagcgatgacgggcggactgctggtcgtcaccgccatttatcttttcattaactttgcgctgctgcacattcttcctgcgaccgacatcgtgaaactcggtgaaaatgcgaccggcaccgctgccggaatgctgtttggcgacatcggaggaaaattgatcagcgtcggaatcatcgtcagcatcttcggctgtttaaacggaaagattctcgcttttccgcgtgtctcatttgcgatggcggaacggaaacagctgccgtttgccggacagatttcgcgggtgcatccgacgttccgcaccccgtggattgccgtgtcatttcagatcgcgctggccattatttttatgatcgccagcaatcccgataagctgtctgaaatctctattttcatgatttatattttttacgtcatggcctttttcgccgtgtttatcctcagaaaaaaaagcggcggaaaaccgcgcgcctacagcgtgcctttgtatccgatcattcctgttttggccatcgcgggttcactgtttgtgctgatcagcacgatcattacagatacactgagctgcgtgctgtccctcttgatcggcctcgccgggctgccgctttatttttggctgaaaaacggcagaaaaaactgacaaaaacggttccttttacgggagccgttttttttctggcaaaatcacgtgcaaaagttgacagcaaattcacatcttttgttatactttttaagcaagatgtctgaattcgaagtatgttacgtttttttggcgaagtgggtaacataagaaaaacaggatgagacacgtttttacgaaaaaatcaagaggcgtttttttcgactttatctgttttttttcgacaaaaggctatataataatttgatgtgtgcattgtctcattcaaacaatggagggtttttaatgataaaaagaaaaaaagataagttctcactccttttaacagaaatcgcaaaaaacatagacgaaaccgcagaatactttgtcaactttaaagtgacgaaccagacgactttaaaggaatttgccgatacgttaaaagagtttgaaacaaaaggagataatcatgttcatgtcatgattaaagagctgaacaaagcttttatcactcccattgaacgtgaagacatccttgagctgacaaacagcctcgatgacgtgcttgacggaatcgaacatttttcagcaatgatggagattttctcgatcacttcttccgatgagcatatcgataagttcagcggatacatcagagagtgcgcgaaggaaattttaatcacgattgaactgcttgcagaaaaccgattgaaggacattcaccctcacgccattaaaattaaggaatacgagcacagctgtgataacctgcaccgtaaatcattaaaaaatctgttcggcacagaaaccgatccgattaaagtgattcagtaccgcgaaatttacgaaacgcttgaggaaattgccgactcttgccaaagcgttgccaataaccttgaaaccattattatgaaaaacgcgtaacgaggggttataatggatactctattacttttaacgatattaattgtcatatgcgctttggtatttgacttcattaacggatttcacgataccgcaaacgccatcgccacctcagtttcgacaaaagcgctgaagccgcggcacgcaatcgtcatggctgccatcatgaactttctcggagcgatgacatttaccggtgtggcgaaaaccattacaaaggacattgtgaatccttatacattagacaacgggtcagttgtcattctggcggctctactcgccgcaatcgcctggaacttgatcacatggtatttcggcattccgagcagctcttcacatgcgattatcggagcgatcgccggagcggccattgcagcgtcaggttttgcaacgcttaattataaagggttcattaagattctcgaagcacttattttatcaccgatcatcgcctttgttctcggctttatcgtatattcgatcgtgaagctgatttttaaagacagcaatttggcgaaaacaaataaacgtttccgcagagtgcagattttgacggctgccattcagtcctatacacacggaacgaacgacgcgcaaaaagcgatgggtatcattacgatggcgcttatgacggccaatttacataaaagtgatgccattcctttttgggtgcagctctcttgtgccctggcaatgggtctcggcacatccatcggcggctggaaaatcattaaaaccgtcggcggaaaaattatgaaaatccgtccggtaaacggcgtatctgccgacttaaccggcgcagccattattttcggggccacgtttattcatctccctgtcagcacgacgcacgtcatttcgtcttccattctcggtgtgggcgcttcccaccgcgtaaaaggcgtaaactggggaacggctaaacggatgctcattacatgggtcatcaccctgccgattgcaggtacactcggcgccatcgcctttttcatcctagatctctttttctgatgacatccgcttctttacagaagcggtttttttgtgacaggaaaatgatgtcatgacatagaatgaacatagcagaccatttttcaaattgtgagggatgctcatgcttatgttttttcagattatggtgtggacgatggcggccgcactcattttatatgtgtacgcatcctggcggtatgaggcaaaggtaaaagaaaaaatgtttgccatccgtaaaacgtggtatttactatttgtactgggctccatggtctattggacatatgatcctgaatcgctctttgccgcatggagacaatatttgattgttgccgtctgctttgcccttattgatgcgtttatctttttgagcgcgtatatcaaaaagctcgccggcaatgaattagagacggatacgcgggaaattttagaagaaaataacgaaatgcttcactcctatcttgaaaaactgaaaacctatcaatatctgttgaaaaatgaaccgatccatgtatattatggaagtacagaagcttatgcggaaggcatcagcagactgctggccgcttatgccgaaaaaatgaatgtcacggcttccttgtgcgactattccgcacaatcggataaggaccgcttgacggagcatatgcctgatgcggcggacgttcagtcccgtcttaaccgtaaagacgtctactatgatcaaaaaggcaggcttgtgcttattccgtttacagtccagaaccgccattacgtgatcaaactcacgtcggaaaacctgttgacggaattcgattatttgcttttcacatcgctaacgagcatttatgatttaatgctgccaatagaagaggaaggtgacggttaaatggagcaggcatttcaaaacgggcagccggaacaaagagcgaaaccgttcaaaatgtttaaaaaacgttcaatgacaagtatcgcaagttaccaggtcagccctcataccgccagaattttcaaagaaaacgagcggctgattgacaagtataaacaaaaaaaagcttgattacactaaggacaggagacacggctcttgtccttattccttttttccttatctttcatataataaaaccaacaaagagatgcgacaggtgatgatgtgaagaaaattgtcaggcgcgtaaagtttgtggattacggacgcttcgggctttccgcttattcgctgaggatgcgggcgaggaatctcaggctattgaaccggttaaaaaagaaaaaaggctgaatcccgcaatgtgaacgggactcagccttttttgttaaagctgcatcagaattttcgcttttacagcggggccgtagacgccgtcagacgtcagtccgtttacagattggaagcgggccacggcatctgcggttttcggaccgtagataccgtcaattccgttattgacagctcctttttcaggatagaaataaagcgcggcgagcgcgttttgcacctggtataccttttcgccggacgtgtacggctctgtcagctgaatcacctcgtccggaagagaatacagtgcttcaaccggcgggctgacgatcagtacttgtccgactttaatcaggttcgggtcagcgatgttattccatttctgcagatcggccacgctgacgccgaatttccgcgcgatcgccgacagcgtatctcctttttggacggtatacgtctgtctttccccagaaccgattcccgctttaaactcatcccatgtatccaacagtcttctcggacaaagctttcctgaccaatgcttgtgcgcaacgacatttgcaagcgtgatgccgtgagaggtcattaatgtgcggatgagccattgggcgtttgccacggcctgtgaaaagttgccgtctgcgttttcacaaatttcaataccgatggatttacggttgccgtccccgtttccgtcaccggcatgccagccgctttcgttcagcggaagatgctgataaatttccgtatcatcgactgtgaaatgccagcttgtcggtgtatcgggatttttcacatagcttgcgtgacttttggcgttagctccgactgcggtattggctgtattgtgcaccgtaatgtaaatcggtgtcattgcatagcctgggcggttattgtttcctgccgggataaaatcctgtgtgatttttaccatattctcatctctcctatttcgataaattgtttatttttaataaagcctgctgttttttcccttttgctgtaacgtaattgtttttaaaccaggcggcggcagtcgttatgattgtaaaaacggccgacccggcggcatacagcgtatctgcaagctggctgacctggtcctcctgaatattcagcggcgatttgccgaacatcagcaaagtttgattcaataaagcaagcaaaagaagcaccgtcctgacgaccgtgcctttgtccgcaaatttcatatcggtttcccccttacttttgcagcagattgtacatgatggcgatggctccgccaatgacgcccgtgcagattgctgtcacgatcgctcctgtaatggtccgcttaatccatgttgtgttttcgtcaattttgttcagtttttcgttcagcgtcatgatttgctgatcctgccggtcggatacccgctctaatacggccacccgctgttcaagcaccttttgttcacctttgatgcctgcgaattctttttgcaccgcttgttcatccagaagcacttcagctcccccctcttacattgttctcacctcccttcggaagcttcattcttacgaaaatgccgtgcctttgatagaaaggctcccgccggaaatgcttttgatttccatgacgatttccttaaagccggcaatatcaaatgaccacacttcttctgtgcctgacgtaccggcggctgatgtcccgtcatcagacttgattcctctgatcggcacgttttttcccgagatggatctcccccaaaacgcgacatggcccgactcagccgtgccggtgatttcgacgagaagttttttccaagcgcccgccgagaagatgcttccctcgcccgcctctgctgcattttcatgaaaaatcacgtctgtatatgaaaacgccatatcaccgcccgaaccgacagattggtataaaacaaattcggactgcttttgatttccgttttcaaaacggaaccggtaatatcgttttgtcaggcagacccaccccgaagcggtcagcactccgccttttactgcgacagaatgtgaagctgtccacgaattgttatcctcgctctcttcgataaaaagagttccgctgcggtccgaataagcccacccctgtgctctgtttattaagacggctcctaaacggtcttgtccgaattggctgtaaacttcaatcgcttctagcggcgtattggtaagaagctctgccattccggacaaatcagcaaccggtgtgacataatcgtttttgttaccgcgataagcttttactgcgccgggtctaccaagttgatcggcgggaaattcaaatgaatgctttttcatcggccgtcctccttttctcatttactaaaaatgacaaataaaaaaagccgtttggcttatgacacagcatttttataattttcgtatgtttcacccgttatttcttgaaattcctcaggcgtgatatacttcgcggccacaccttcagccagatcttcggcagagcagtcatcatagcccatagcctgttttaccatttctattgtggcccacttataaaacaaagcgtaaacccaaaagttaagtctcttcattttttcattctccttttacgtttaataattctaattttaaagacgctaattgcctgccgagtgactgctgcgcttgttcggctgcttttctggccaatttctcattcgccagctgtccgccgaggcctgcaagctggtttgaatcgggagccgtatctttttttaagctgtctttatatgcttcgtcagccgtttccacccattcttgtttctcttcatcaaaaaatgggcgccacatgccttcgccgtttatttccggaggaaagtccgcagcgttaggcggcatcatataatctcctgtctcagaatccggataaagctcaatcggagtgcctgtataaatgttgtcattgtcatacggaaatattaatttcatattctcgctcctttacgtgagtgccaaaacaaggtcaatataataaccgttcacgttattttctatattggccataattcccgtcagcttcatatctccattagaataaataataaatttgctgtaaccggtggtgccgctggctgcaaccatcgtcacaacgcctttggccggcgcacaagaggatggcacactcccgaataccacttctctgtccgtaagaacgtgtccgttcaggtgaagggtgtttcccactttgcggtattgaagcggcctgtctcctgatttagcgccatttttataaggaacatttatccaaggtacattctcagtatcaagttcagtaatgaggcgacgccagccctgccagcccaagttcaaatccaaatagttcgtgaacatattatttttataatcaacggcaatgacatatccaaacgttccctttccttcactgtcaagagaggtaaaatgaaacatgccgcgggtcgaagcgttgctcggactgtttgccgctttgccggttgagtaaaaggtgccgaacgccctgccgtttttaacgattttttcaagaaagttatcatcatcaccaattgtaagaagatagccgccgttatcgtttgttattttcgaaagctgtgcgccgttccagatatttttatccgcctgtgtgacatggatgtcttttttattagcgtgagcgtctacttttgcttgagagcctgcatctgtttctctttggctccattccgaccatacgcctttagtgctgaaacttcggacgtatatgggatttccggcggtcactgtgtctataaacatttggacaaacgtcggtgatgctccgcgggttctttgcattacaattaattgtccgtattccgcaggcttattttccgtatgctgaactgatatatagtagataccggacgtttttatattgtctaagtttgtttccgttaccgttttagcattcccgtcattgtcagtcagattgaataactgccctgcattccatttgtctttgtcagacttggttacatgaagatctgttttgtcggcatgctcatttacttttgcttgtgctccggcagctgtttcaaatggcatccattccgtccagatgccgtttttcagcgtttttctccaaaatcccccgtcatctgagaaagcggccgcctctccgttattctttgaagaataaaggtatataccctctgacggtttaggcggggtatttactccagttgcagccgctgagaaagtaaaggtcttattctggctggcagcggtctgatgaaaatcctgtccgtcagagatatcaataaaagcggagccattatcttttgtcattttagacaattgcccgttattccacttctggcgctcttccttcgtcacatgccggtccagatcttgattgtgctgatcaaaatctttctttgctgcctgctggacattgtctacgtttccgagaccgatttgcgcctttgtcgttttgtgcgggttgttcatgtcgtttttatgggccgccagatccgtgtgtgcgtcatttatgcctttttcccagcggttgacgtcatcttcgttaatcggatcgtccggaagccagtctgttttttcttcgtaagccatcgttacaccacctcaaaggtaaatcttaaatcaagcgttctgttattactgagatctaaatttgtttttcgttctgtgatgacgcttcctgtttcgtcaagcatctgcacggtttcaatgtgtttgacgtcttcttccctgcgtgtgagaacggtgactgcggcatcttttacggaaatgtccgcaatcggagtttcttttccgtttaacagcacttttgtgatcctgtttttcagatcggctgcggcacgctgtctgtaagcggctgatatcatggtaagaccacctcgttattgttgagtgtgacggaataaccgaccttcagttcactgacttttcggtatctccgattgttgagaatgacccggtctttgatttccagtgtttcgtttaatgcggctctcagtgtatacgccaaatgagcgggtttgattttttcaagcgtttcaatcagctcgttcatgtgctgcaggtcatcaagcccgatatcggcataaaaacgatactgccccggaaacatccgaacgtaagctgacggatgttttaaaaaacggtttagcgcctgctcgatcgcttgatgtgtgatgggcggaatattcgacatcttggaaatcagcctgagccgtctcatatcctccgtgtcacctgattcccgcggtatttttaatattttttcccagcggtcaagcccccacgtcgccgtcgtgataaagagctgatctgtcaaatcgaaaatatcgttattctgccgctcaaactcaggagcttccgcctcaagcagttgtgccatctcctttaatcgggttaaaaacggcgggaggtacgccgtcatctcatcgagtctgctcaaggattgtcacctctttgagtttaggaatttccacgtcactgagcacgaggttttccgccgcaccgttcattttgatatcggcgtagtcactgacggatgccgagttataaacgatgttgtttatttgtgataaacggacggtgttttcttcgaaggccattttcttaaataaattcaggacgcctttttcaatctccgctttcacgtcatcgatcgagctgttcagctcaggcagcacggaagcggagatttcgatttccttccatacggcgctttccaccgttactgccgctccgatcggcgcctgtccttctccctgcccttcgtccggatcaatataatcctttactttcttgatcagaatatttgatgccggttccaaattcgcatttgtgatgacaaccttcaccgttccggctccgttccaaagcggaaagattttcgccctgccgacgccgtcaacctcttcggcccattgtttataatgctgtttatttgcgctgactgcctcccggcggacacgggtaaaatagcgcgtccttaagctgctgtcatcttcttcttcacggccgggaattaatatatcgcccatgaccgctttctcaagcccgggaatcgtatcaagcggcagcagattttgacctgtaatgccggcattgcccgcttctccggccgtttcacactcgagcgttccatcctccgtatattgaaaatacaggttatcaacgaagaaacgggagcctggcggaatggtgatgcccgctgtgaattctccggctctgaccgcttttgtggcaggtgttcgttcaattcccgcttcagcagcccgcctgtccagaaattctccctgagccgtatcggaaaacacgagctccagcacggtatcaagccaaatataagactttgcgagctcagcggccgcaggcgcgagcgcattgtaaatgacgctgccttctctcgtatcaatatctgccgtaatgcgcgccagcattctgtccataatgtcgtcaaacgtctgagcttcaaacatcctcacccagcacctcctctatctcaagcatgccctcatcagtttcaacggtaaaagagacggtgaaggcatcatcttttttctcaatctcaaaattggtaacagccaaaatacggtcatcatacagcaaggcttcttctatcagtcttggaatctccatttttttataagcatccgtcgtgttctgatctgaaagcacttcctgaagttcgtttccaatatcatggctgaaaaccgaatatgaataccgttctgtgtgaagagcgatatagacgaattgtctgattgcgtccagtccgtttatcagttcattggtaatccggttgttttcaaaatcaattcggtaggtttgtgaagtctcaacggcctcactcgcatcctccaaatcttcaaattcgatttccggtgtcagggccattgcacccgctccttttagatttgatcatgtaaaaaagccctcttcggatgatgaagcggctttaataggctgatattctggtacagttccgtccgaatgccggttaaattttgtccagtacaaagaaagactgtcctcctgttaaagcggcggtcatcacccgatctcccgcctggagctgatcatcttctccggatctcagccgcttcggtacaatgagtgcatcagacggaatcaaaagtttgtcgtgatctttcagtttcagctcgagcggcgaaacggaggtcacttcggccggcatcagctccaccggcgcttcggcgtcaaccgctccgacggctaaatgtttaatggcatcacttaatctcatcaggatgtcccctccggaagtgaatttttctccgtgacgtcaatcgtcatggtatgttttgttccttggaattcatggcggtccgtatctacataataggttttcttcagcccgatttccggaattgagatatagacaggcaatccgctttccaacccaggaataccgatcgcctgtatatttttcagctctttcttaacgccttttttctcagcctgcttcacttttgcgcgctgtttcagctgggcttcattaatgtcgtcagaaaccgtttcggtatactgcaaaacgccgaatgttttcatgcccgcgctgtctgacgcggaagcctttatcgttttattgtctttttgcagccgcatgacgacacgggttgcggtgtcatcaattgaggtgctgtattgataccctgtgatattaactcctgtttccagcacccatatgtcagacggctccggccattcacgcaagccgagcctgcctttttctgaatagagctgataattgcgccccgtctggctttttgtctgctttaacgcttttagcatcatatcgtaaaggcttgtatcatttttaaaaacgagtgatttaatggtatggcctgtgttggcaatggatgtgacgggaatttgaaaatcgctggcgatccttttcaatatttgatcggcgcgcttgttggaaaacacgtaaacgtcctggtttttcacaaggtattgaagcatatcgtatgcggtgaaggcgatggtttgctcatcgggcgttcttgcaaagacaatgccgcggaatagttcttttccgttccatttgaacaaaaccgtatccccctctgatacaccgtaatacgtctggctgccctgctttacgacaatcgtcgcttcgatggagcggggcgcctgatatctgtgtccttccagcgttacgctttctgtgacaagctcgagccactccgtttcttttatgacaaatagttcaatcatcttttcacccgtttcattgcggtatcttcagcttctgccccgggaagatccaatgccccggctgccggatattccttttgctgcgcttaatcatggcggttttattcgcgttccagattttccgccactccgtgtgttttccgtaaaacttaccggcgatgtcccaaagcgtatccccttttttgacggtatatgttttgggtgaaactttggacgggcgcttcactttcgtttttttcttttgtttgatttttcttggcgaagcggttttatattcttttagtacgatatcaaaattccggtcgccgatttcattgtcaccttcgctgtaattgaagctttcaatgctgcatgtgacattaacttttgttcctgtaatcaaaaactgaacgggttttttcgctttcatccatgcttcaatggctgaaatggctttttccggcgaagggatgctttgatattcggcaatcgggctgtaccgtttcggaaaaaaagaagagaacgaaatttctttcgctcccagttcttcgataaacgtcacctctccaagtccggtgactttcacggaatcattctgcacgctgtttgcgatatcaatcgcttcagggagaacgggaagccggagcttgtccttcccctgagacagccaaaattcgtaaacagatttagtcaaaagcaacggccccctttgctccggtataaatgtctttttgcagttcatcaatcagcgcctgtttgattttggcggcgaggctgtcggcgtcctgtccgttatggaaatgctgatcgccgctgaattcgattttaatttcttttgttcccattttttgaacggtttgtccgccgcctttaacggctgcggaaaccgtgccggctgaaagcgccgccggttccgtctgggacggatcggacacttccatgccgagcgcttgagcggcttgttgcagcagataacggccgcggatgccccgctcttcagggatgatccactcccgtttgttcccttcgccgacacgggcgatctgctccttggtaatcagacccccattggcataaccgacgtaagggcctccatgagccatacttttaatcccggggacattgctgatcgagccgtatcggcttttaatatagccgatagcggcagcggcgttgtgaattggatttctgatatcattcatgcccggcgctttgtgatcttcaaaggtgctcggaatcgtctgcataagcccctgtgacgggtgtccggctttggcgttgctgtcccatagattaatggaattagggttgccgcctgactcatactgtgcgatcgtcattaatcccggaagccagctgatcggcgtattggttgctttcattgcggccaaaagccactctttgacgcttcctcccgctgcacccatgccggaaaaggctgctgcaagcgagcctgcctgtttttcggcgtattttttcacgtcaactgagccgagccctttgacgacgccgactgaagcaaagcgcccgaggctcatcatgacacgggaaggagagtgaatatcaagctcttccctgaatgcgtcctcgacttttttggccatatctttggccgcctgtttgacttcgcttccttttgcagtcatccctgatacgaagtgtccgatcaggcctgacccccagccgttcgcggaatctcttgattgcacaaacggtttattgatatgtgtgcttacgtattgcgacgttcccgtatcttttgcattctgtccggccgaatatcctttcaccgttgcggcgccccatgatgacgattgattaaccgccgattgataaggtgttttcaccttcgtttttaaaaatgaatcggtgcccgtcggtgaagtattctgacctttggcatagcccgcaacgacttgctttccgtaaccggatgaagacgaaatgagggtattgaacggcgctccgatgtttttttccttccagccgtccatatccaccgcttttttgctgattccgctgtcaaagccttcagtaaactgtttgccgagtgatgaagccgtcccggcaaatccggaagaatccacagacgctgcggccgatacagatgcagaagaagaaacaccgcccgctcccgccggtgcagcggaagactgggccgaagccgcgcccatatcatcgacaacacgcatgccgagcttagacgcagcttgtgaaagcagcatctttccgcgtccgcgattgttgtcaacgggaatgacaaattctttaccggcttcaccgatccaggaaatggtcggctttgtaatgtagccgcccgtggcgtttttgtccgttttctttttatctccgccgcctcctgtgacaaagttcattatgcctgaaatcattttgccgccggttttatcccaaatctttttcacccagtcgaatgctgcagaaaaagcatctgatatggccgttcccacttttacaagaggttcttttatatgtttctcaaaccagccgcttaaccctttccatatattctttaccgtatctaaagcagtctggaaagcatctgatattcctttaccgacatttttcaccatgtctttcaccggattccagacagtatccatgaaccagccggaaaccgtactgaaaacagatttaattttatcccaagctcctgtgattttactccaaatggacgtcgccactccgacgacagccgattttacgggcccccataccgtgctcataaaccagccggatactgtgctgaagacaccttgaatcgtcgtccacgcattcacgatatttgaccagatgctggttgccactccgacgacagccgatgaaaccggcgtccatacattttccatgaaccaggatgacaccgtgctgaaaatcccttgaatcgtcgtccacgcattcacaatatttgaccagatgcttgtcgccactccgacgacagccgatgaaaccggcgtccatacattttccatgaaccaggatgaaacgcttccccaagtatcttgtattgttgtccaagcactttgcgccgctttggaaatatcattccacgtgtctttcaaagctcctgaatcaaaggcctctcccaagctggaaccgcctaaactgccggcgatgccgcctaccgcgccgccgattaatgtgcctactccgggaacaacgctgccgattgccgctccggccgcggctccggcaagaccgccgcctgctgagccgaccttctctcctgcattatctttattgatgccggctaaatcagtaagtgataacaattcacctatgccgggaattcctttagcggcaccttttaaccctttcataccgccttttagcgcctttgaatctcccaagcctttcaaaagcgcgccgatgcctttacctgccccttttgttttcggcgtgtttacggatgcctgtttgctttcctttacggaggaacctcttttcgaggatttatttcgcccttcgactgtactgctattgcccctcgtcactccggtacagcagcagcagccccccaaagccccgccagttttttttgctgactttcctgaagattttggcgctgttaccgtgcgctgtgaaccctttgtcagatcaggacgcttcgggccgttggagccgccggcagtaaggccgcccttactcttttcttttttcgtgccgcctcctaataatccgccgatattgagtttgcctaatttttcagcgattcctgataatattttttctattaattccccggctttttcgatgattttgtccgggctgaatttctcaaatttcttggcaatcttgctgacaattttatcaacaaatgcctcggctttttcgatgatcgcatcaggactgaatttgccgaactttttatcaatgcctccgaacagtgaggatgtaaactgctccactttttccaaaatcttatccggattgagaaaatcgaatttctcagaaattcggtcaatcgtgtcatttacaaattgttcggcgcggtcgattagcttatcaggactgaatttgccgacaacgtcgtcgactttcttcataaacgaatcagtaaaatgatccagctctttcaatatggtctccggactgaatttgctgacaacgtcatctatctttttcataaatgaatcagtgaatttatccagttctttcaatatggtctccggactgaatttactcacaaccccgtctacctttttcataaatgaatcagcgaatttatccagctctgctaaaatcgtctccgggctgaatttgcttgcgatttcgtccacttttcccatgaatgatgttgtgaacttgtccagttcggctaatatcgttgccgggctgaatttgcttgcgatctcatccacttttcccatgaatgaggtcgtgaacttgtccagttcggctaatatcgtctccgggctgaatttgcttgcgatctcgtccacttttcccaagaatgacgttgtgaacttatccagttcggttaaaatcgttgccggactgaatttgctcgcgatctcgtccacttttcccatgaatgacgttgtgaacttatccagctctgccaaaatcgttgccgggctgaatttgcttgcgatttcgtccgcttttcccatgaatgatgttgtgaacttgtccagttcggctaatatcgttgccgggctgaatttgcttgcgatctcatccacttttcccatgaatgaggtcgtgaacttatcgagttctgctaatatcgtttgcgggctgaatttgcttgcgatttcgtccgctttcttcataaagcttgcagcgaatttatccagttccgctatgattgtttccggataaaatttggatgcgatgtcattgacttttttcatgaaggtgtctgcaatggagtcaagcattgaaaaatcgtttttcggcgaagcaggagcagcagatacagaagcttttccgacgtccggcatattcttttgcattgcagccagctgtgctgtcaccttttcgtttaacgataattgaatgacattgttttttcccgtcagcgaatcaatgcccgctgaaattcggccgactgttttcatgacgtgatctatgacgcgtatagtgacagagtacccgttctttaacgcagattgcatatagcgtttgatacgttccatggcaggggtcacttcgtctgacgcatacagtgaaacggtaaatcctttaaaaccggcagccagatcccgcaatctctcaaatgccgctgtcgcgctgtcttttgctcctattttaatggttaaagacgcaggcagatccgctaattgggcttgcaccttttgaatgacggcactggctccgtcttcagctgaaatagagatcatttgtgcgcccagctttcttttcatagagcgctgaatgcggtcaattgttcttaaaacagatttactctctttgcgtatatcaatttcactttggcgttttgtcattttcctgtatttctcaagcgctctgaagccattttggattttccttattttctttgaaacccgatcttccaattcaaaacgggcggtcagctttgccatgatgtcgctccccctttcttcgcttgtttttcaagaatgtccagcttgtaaccgattaaaccgtacaacagcgccttaaaatgtctcggtgcttcatataactctttcagttctgatggagaataatgaagctcatgcatcgcgtaatagagatacacggcttccttattcccatcttttatcagttttttgcttcttgctccagatcttctaattcatcttcaaaaccattgatctcaatcgctttattcagccaatttgcatactcaccgccgactgaaagcacgcgttttgccacctcgaccggatctgccgttttgtaagcgtcgcggagctccttagaccggaaatcagggtaaatcgtagattcaaccgcgatccgcgcataaaagcgctggctgtctaagtcttttactcggcctctgcccttcacatttttatatgtcgtgctttccttctccagttcatcaatgcgctcagtcgtaatggctttaaaaataaaaggcacgatgtttccttttttatcgacaaaacgctttgaaagcggaacccgaatctcctcagcctcgactgttttacccggcataaagaatgatagatcatatacttgttcgtttttttcgctcatgatgaaaactcccttactcttttttttataaaaaacaggcctgtaaaaaggcctgtttcactcataccgatcttaattaaaacgtttcagaaagcttttccggcacatcgaaatcttcaaaggtaaacggcacttcttcttcgagtgcttctgagtctacgtccagtccggcgatttttgcagaatcaaagttgacgtcatacagagtaacgcgttctgttccccggcccgatgatttgtcatcaagaacggcttgcagcgtaaaatacgggtcgctgccttttttgacgtaatccatcataaggactgcgaatttggatgtgaccttatagaatgttgccgtgcccgttccgttggcgcctgttgttttatgtcccgtcatgcggcggcccatgatgtttacttctgatttgtttttttccacgtttgcttcaaacgttttaatatgcgccatctcttctccgtcgagaaataaacggccttcttttcctgaaatcgtgttttgcgcttttaatgccatcttagtttacctccacgttaaagtagaatttttctgccgcatccacaggctgtacggcgagatcgattaaaaagccgtcgcggtcttcattcagcccgattgtaatgtctgtatctgagtcaaaatttgcgatgccgcccgcatcctgaagcgtagtcaaatattgaatgatcatcgttttgacgaattgaaggccgtcatttgtcgcaggaagatcgctgcccgtgccttttttcgatttaattaaggctttcagttctcttgtcaaatcgttattcaccgcatcaagcacacggacgattttgtttttcgcgaactttttgtttttctctgccgtaaatgtcaccaatgagttgatatctttttcaacgctgactgacttatcacgggcatcataagagaaaaggaattcacctttggaaagacgttcgatcacttcatcatgagtcaggcggtgcagcacatcgacggcgccttcgtattcaacgaatgttaaggattgattaaatgcggcgctggcacttgcgcctgccacccaggcggtcgcatcttcagctttaatctcggttccgtcttccagcagcacaccttcagtaacattgataatgccttcataatccccgctgtaatgggcggtcaccccttgcactttctgtccctgcgcatcgcgaaggcgtttaatgaatgcggcaaatgtcgctttcagctgatcgttttccgcgacaggaagagcgatgacatcgaaattctccgtttcagcagcagctaaaaaatccgtatagtctgagttgaccggtgctttatcagttccgcccgcgagacggatgcctgcctgcgggtttaacttttccccggattcttcctcagtgcctgtcagcgggatggaagccgacagttcgcccgttcccgtaaatgtgacatagccgtttgcttttaattcttcggcttttttcaccgtttgtttgtcaacttccgcttcatccatgtaagtggtcacatcgaaagcggtctgatcaaggacgttttcactgatgcggatgatgatgtcatttccttttgaaccgccgtacaaagcggttgctttaacaccttgtgaaagatcggcgctcgctctgattccctctgtcagacggtacatcaaaacggtttttgctttctttttcgcctcacgaagcagaatcagtgacggatcttcaatactgagccccacttttttattcaaatcttcaatgcttgaaatggaaacgaatgttttcgcttccccccagccggatgcgacgggaagggcgacaatcccgcgttcaccgatcgatacccgctcctgggcggttgttttaaagttaaaatagatcccggcacgttctttttcttttccttgcgtaaatgttccgccgttcattattgcatgacctccttggttaaaaatgcttcaatgtaagacttagcttgcgcttttgtcatttgtttttgcttcacgccgaataaagcaccctggagaatctcgggttttacgccgaaaagctccttcgcgtgctttgttaaatccgccgtgtcataaagaaccgctcgttccgccgctgcggcgtttttctttttatattgtttcacttttctttcaccccgctgttaatgtccacatcccgcagtgcgggagatgtttgtttctgatagtagtagcggctcgtccagcggattgtgatcactgcctcgcctttgtctccgactcttgtttcgatacggctgatgcggacgaaatcaccggtatcctcccctgattccgtaagcagcggaatcagctgtcttgattctctcaccgcatcggcgatccggtcggctgcatagagcgcctgcaccgagtcggcatggaacagcttcacattcagactgtatgtcttcttaaaggtggagactgtgtcattctcgtcaaaaacatacgggggcggaatgtatagtgacggcacctgaaattgttcaggcagttcattttcatatacgggcacgccgcactgctgatacaaaaaagcggcgattgaaccggtttcgcgattcatccgatatctccccccaacgtgttaagccactgattgaaacgcttgtccagcgattcggcgaagagtgtttcatacaaaagaagggctttgtcccaaaacccattcccgctgatccactgttttttgagcgccattcccgttgaagctgacggatcatagatgaaccgggagccttgaaaatatccgggcacccatctgacattttcatctgagacggtccaatgtccgtcatttatgaatgaggcatactctacattggtgccgatttcaagggtcagtcccccgttttcaatgatccatacatgatcctgcgctccttttcggaaagaagacagcaggttttctgtatcaattcctcccgaatgaataagctcctcccgtaccatgtcgagaaaatcctctcctgactgttccagccattcgcctgcctgacgggcaaattctccggatgatgccttttgcagcgaccgattccattgttcaaggttttttatgctcatagtctgtcatctctcacagcgataacctcccaatggtgctgtcttgctttcttcggcatttccagaatatacgcctgtccttcccaaatgattttgtcattgacacgcacagcggcctctttcggaaaatgaacgagaaaccgctgatataccttatgatcaggcgcaagctgaataagctgctgctgtttttcaacaaacagacacggcacgtcttcagcatcgggcacttccggataagaaaagacaggctggagcttttcggcgggaatcccgaagcgtccggccttcggaactgacaccgtctcatgataaatatcgcatctgtcagtgagcagcccttcgtagctcataaaggtctcacctttgcgtttgcagaaaccggggaataacccggcgcgatatattcacagagcagatggtgcaccgccggttttctgattccgccttcacctgccaccgtatacgagtagccgcctatcttttcagattgataggcggaagcggctgcttcattctggttgatcagcgcaaaatattgagaaagctttaataacgcaagcttaatcttttcgggaagcggtgagtaaatagggtcagtgaacgaatgccccgccattcttgccgcttccgcctccgcctccagaatgtcctgtataagaagcggctccggcctgtttttgacttgatcataaactgaatatgaaacaacgtcagacggctgaattaacataactgccacccccgtcttattctttaacgtttacgattttggcgcttgcatcttcttcttcaaatttgctgtcaagtttagccgtcagtacgataataaatttgcggctgcgaatatctttatctacttcgattcggatattccgtgaaaaaccgagaatgatattttttgggtgagtcaaaatgatgtcagacgcatcgtattgggagtcaccttctccgaccgagtacggctgcagattggacactcctttgaccggaacgccgaatgctgaagacaaaccgccctgcaccgcaagatcccccaggttggtctgacggtcagccacacggtctttccattcaatctccatgccttgagatgtgtaaaatctgaattcctgaggcaggcgcaaatattttgccggaatggcttttaagccttttttaaatgtggctctggacagctcttccccgtttccgtcaatgacgtgagatacagtctgcttacggattccgtcaagctgtgccaagtacggatcagaagaagatgtatcgccgtttacgacaagctcctcaatatcgactgccgcccgctccgccaaaatctgcatgatcgtctgctgcaggccgtctttttctatattgttttcaagcgtgtcataggtgatattaatttccgcaatgacttctttcgtattcagctgcaccgtacttgttgccgggacggtcagctgatcgtcagttaaggcttttccttcctcagcggcacgcagaatccgctggccgaaaccgattttttcaaatttctgcgagtcattttccatttgaatcacacgcgattcgctgaaaatggtcggcgtgttctgcaccatgcggataaatgctgaagcttgtgcggggttcattaaaccgccgctttttaaagcggaaagtgacatttccgcctttctgatgatatcttgatttctcactctacagttcctccttctgactgggcttaaagcagtccgctccaaatggattttttaacaggctcttggccgcccgtctcttcttccggctgctttgatgcgcctcttactttttcaagcgcttcaatgcgtttaataatcggggcgagcatgtcctcaacaagcgttttcagcttttcttcatcagacggcgcagccgccccgtctttgtcttccgtgttttggtccaagctgtcaagccgctttaaaagcgggtgcagcgcgtgttcaatcgattctcttacgtcttcttttctcatcttgttcaagtcctctcccttgcggtttcttgatttgcggtcacggtcgagaaattgcttgaccgcgccgaataagccggcttgcttttctgccggctcttcgtaaacgtcagcggttcccgccatgctgtagcccgtaatgataccggctttaatctgatcccatacttcatcggaagctttggtgacaagcacccaagatcctttccggatcacagcattcccgatttcaaagtcatccggagcgacgtacgactctaccacctcgccggtcccgccttcaaaattatgatttgtatcgatgttgcgggcgtccgccaaaaaaccgtgggcggccttttcaatctcttcagccgtcatataatcaccatgggcatccgggacatccggctcgtaaacgatgccgtaaacaagcttctgctcatccgattcgttttttgtaaacacctgcacctttttttcaaatgacggaaggcctccggctgattttgtaaaaaagaattccgtttggttcgccgccttatcgacatagctcacaaaactgatgacggcatttctcaattctctcggcacgagatgttttcaccccctttcaggattgctcctttttccctttcagcaccggccggctgtagtactcttcaggccattcctcaagcgtcttgccgagcactcttccggccagatcacggaggtcattaggagagaccgcgccggcggaaataaatggcgtaagcaccttcgcaatttcaagcggatcgcgaaaatcaggcccttttaatgtgagctgtacatcgtggagacccagttcaggcaaaaataacgtgttgagcttattaatcagcgttttccgctccggctgaaacacctgctcctccgttattttccgtgccgtatcggcggtggctttgttgtattcctgcgcctcgcccgtataaagcggcgggagacggaaagcggaacggagtttatttctgcttttgtcgtcatattcaagaaacagcgcatcatcctgcagaatttccgcaagtgatttaatttccacagacacgggcgtaatgtcttcgcctccgtgaaggtctttttccttcgcaatgccttccgcctcaatcagcagaaacttgtgggcgttttccaccccttccaggtcattcatataatcctggagctctttgtacgatgcttctgacagcatgccgttttcaaccgtaatggcggccggcacgtgacggccctgcttgaaatacataaaattcagttcttccgctttccgggcgccgtacagattgacgatattgccgacccagcgcggaattccgtaagtgccgctgccgatttttaagtgaatggcttcatttgcccggtattcttcagacagggtctttacgtattcgccggttctcatgtccatcatgcgggggtcgccgtattccttaaaaaacactttccgaccgttcagcatctgaacatatttacggaaccgtttttgccttttaatcgttttggatgcgccgttttcttcatatgaaaatgtgacttcaacgggatcagtcacaccgcacacgcgcatatgtttcacatccagatattcaatccccgctggttttcccgccccgtcccgaagcacttcgagaaaaccgttgcccgttttttcacggtcttctatcgcatatccgaggatcgtctcggccgattcatcaaaatgaagacatttgtaaaagctctccagcttcatccagtttttttcggcccgggccttttttgacggggagcaatccgggctatttacatcaaaggtatattccacatcaaacccaaaacccgtaatattgacccgatacgcgtcaatgcactgctgaagaatcgtcgagtattcggcgattgttttcagttcaatgagattatagggcggtgaaatgatgtcttcgccgtacagatcggcaaattgatcttcgttcatctgccttgcctgcggcgcggccatttttgatttaaagacggtggctctaacgttttgatagttcggcaacgcctacctcctcctttcccgattcggacgtcttcgtttttgtgatgcatctttcagatccgccgcgtcatagtcatccagcgcataccaaatggctgaaagtgtgtggggatcaattgaaaactcatcttccgacagagcgccgtttttgttttttgcgtacgttaagttctgcaattcgcggatcgtatgttgacagctgtctgagcaatagatgtgtttgaaccgtttcagtttttttgtatactgaagtcttgagcccggaaactttttggccgcaaccatgcaaaagccctgcctgcgaaaatattggatgcttttcggctcagccgaatccgctttgatcagctctttttgatccgccaattcctgaagctcctcagctgtctgatcatcggtcattttgtttttgtaatactcccagaaaatataaagctctttttgatccggatcgacggcaagccggatgaccgcattgtatgactcttcaaaaccgaaatccatgccggtccgaaacagggggcgcctgatggaagcaatccgctccgttacttcgttgtgctccatgacctgaaactgcggaaacacgcggatgccattgacgccgaactgtcctttgcgggcgatccggtataaatcgggatcgtaatgccgtaaactgtccagctgcttaatatagcttttcggcaaaaacagattatcgcacgctgtggaatggtggtaatacgtatctcccttaacgacggtgcctttttcatacagcgtctgatcatccaatacgaaccgttttttttgatcatcacgaaaaaaatgccggtacgtccaattggaggtgccgacgggattggtggtgcatatcatatgaagcgaaaactcgggatggcgcagacgcccgatcagctccttaaagccttcatacttcacttcagagcattcttcaatccaaatcagggaaatatgatgaatggatttcaatttggccgggttgtccatccctttaaacataatccggcttccgtttgaaaatctcagctgcatcggtgaagacacggcctttacggcatgtcccagctcaagctccccgataatatcttcaaacaaggcaaaagtagaatctctgtgcgtatcgaaaacttcccgcacgacaagcgccgtccgcttttcacgaagcagcttcaggatgattttcagcgcggtatgatagctttttgacgagccgtagcctccgacgagaaattggtacgtttcattccaattgaacaaataatcttcaaagcgcgggttgaccgctttttcaatcatgaccgttcctctttccgcgtaatgacaatgtcaatcggcttttggctgtcttctgttttttccatcttctgctgtgccagctttaatttttcattttcgattttttgtttaaattgatcagggaaaaggtcaaagtacaaggacagcttttcaagagccttcatcttgtcggcaagctttattgcaatgccctcttttccgagttttgcttctgtgacgatggttccgtccagaaggtgcgaatctttaacgtcaacgtagctgatttcctgcataatcggcttatcattttcgtcaaagagcggccctgattttccgaaggcctgaacctctttttttccgaaggttacataatcggtaatgtcggcgaaagcgattttcacatagacttgaagaacgtccatcgcttcgacaaacactttattgaccatttcctttttcatgcggctgatttctttggcgactttttcgttttttaacagcctgcttcccgtcacatgcgcgctttccggtgaatagccggcttttatcgcagattgggtggcgttaaagcttttcacataataaagacaaaacagccgctggcgttcgtttaactcatcaccttcgcccgggttgttttttccgccgctttccgcgttcttatgaagcgcctcgtcccagcgcccttcttttttccatctgccgatcgttcttgcggatacgcctgatttgccggcaagggcgcgatttgtgatgcggcctttatgagactgatagattgtaaatgcctgttttctttttgcgtttttcatgctacggcatcaccgccacctccgacatgattgtctataataaaaagcggcttctaatcgggccgctttttgtgatcgtctgttcacttctaggtggcaaacgtatgacaacttatgaagcaggcgattgatttctttgttcctgctgtttttgtattttcagaagcgcccgtttgaccgtcgtctgtacggttgatttctttacattcagcaaggcggcgatccgttcatatgaaaagcattccgctttgtggagcagcagcatttctttttctctatccgttaaaacggctaatgcgtcccgcagtctgattctgtcttcttcagtcacatttgcggaaggttcaaacatcagcgcctgcgaataggtttctataattctcggatctttaatcagcattctctgataagcgtctctgcggtctatcgctcttcttatgccgggctgccggcctttttcaagccattcgatgacatattccacatctgtaatgatcgttctgatgatttttttatctttcagttcttctgaagtaagcaccgtttcatcggcttcctccagctgcttgtaccactttttcgtctctttcagcgtgcgtttatattcaaatagtaagtcttccatgcagatcctcctctttttcggaacaaaaaaaggacaccaaccaatgcgcagcatgtacgcgattgatcagtgtccgcaggctttccgtcttggacgtattctgtttttttcgattaattcaatttaaagccgatttcatattcgacccgggccagatccccttttcgcgtttcgacaagcgttttgccgtgctccggcgcttcggcgagccatgcttccttcttcagtccgtctacaataatcacccgaaccttgccttcttccagctggctttgtaatgttgtatgttcaatgtcagtcagttttttaggattcatgttttacgtcctccgtttttttcaggatgtttacttcatgtatgaggcttccgagctcatttatgaacgcttctttttcttcagaactttctccccggagcaggcggagagccgtttcggccgcctcaaaaagttccggagcctttgccatcaatgccgcgttgatctgctgagagtatgaacttaagttgaaaacggccgcgatgagccttccgtttgaataagggaacttctctttatccgcttcgctgtaagcggaataaatgtaaatgggtttttcttctccgctgtgtacggcccgccatggagcggggctgtgtttttcttgcaatggttatcctcactttccatcagcctcatgccatgcttcaatttgcttttctatccgtttcgccctgaacagcaggcaaaaaagccatttaatatatttatacacgtgcatcaagcctcgcttttgcgtcttgaaccattcgctcaagacgtttaatgaccggcgttaaatcagtgcctgttttgcagttcgggcaagggtgaaagacagcgccgaaacccgtttccgtcacaatgaccttcttcggcccgcacagcttacacattatctcgccccctctaatctgtggtttacgtcaaatgaattgccattaatgatgactaaataatcgctgcacatctcataaattcttgtgcccaaggcttcatcaacctgcaccagcccgtcacaggccagctcgctcgagataagaaccggcttatgatttaaataacggtaattcacgacggcgtacatttgttcaatctgccaatcggtcgcccggggttttccattcagcggtttgaacagatcgtcaataaaaagcacatccgcctgtttcatacggccaagctttgcatcaagcagatcaaaatcattttttaaatccgtaaagccctccacaaaaggaaaatacagcacgggtgtctgcatctgtctcatgacataattgctgagagcggtcaaaagatgggtttttcccgaccccggacgccctaaaagggcaatgctgtttttccggcagtttttaatcttgtcgaagttttcaacatattcaagggcgcactcatatgcgtcgacgactgcctgaggcttgccccgcgtgataaatcctttgaagtccagcttccgaaaggcgcctgtaatctcacttgcgctgaggatgcgctctgcttttcgttcggcggcgcagcggcacttaacccacacatccattcccagctggtttttgagataaccgccctgatctttacagagcggacagtcaaagcggctttcgtctgattcttccggtctgtccgccagtaatggacgttttccgtttttcaggtcggccagtatctgctcgatcgttcgttttgtcatgtatcgtattcctctctttttttgttgtgattgtccttcccgcaattcgtgcattcaagcggtcttccatatacttggcgcaatagctgaaagccttgatcgtttcagctgaagaggtgcgccgctgttcaaaagcggtaaagcattcgccgagccatttgattgcttcttgtgctgacgcaccgagggaaacaatacgggcgatggcctgataatcccggggcgacgggtatacgctccgcccctcctgtgcagaccttaatctgataaaatgggcggcaatgtcgttaatcgcttcttcagcagtatgattttttgttatatctatttctctccggacatttttgtcccggtgatccgccgatattgtccggtcagttgcttccgggcgggtcaatgtctttttcggcgtgaatcttttcgagtgctttacggagacgatgagtccgtaaggggcgcggacggttttgatatattcatgctgttccaaaacctcaagccaccgtctgacggttttttcgctgacggcaaatacatcggccatctctcttgcttttacgggcttatgaccaaggacgatcccccactttacaccgtcttttacgtgttcctttgtcgttgagctgatgaaccataaaaacagccaaatagcagaccctattttgtcataatgttctgaattcaataatccggaatagatgaaaaacgggtagcttttacgattcataagggacgtctccgtttgtcttcagacctatatagcgttcatactgcaatcggttatcaaatcggaataccggaagtccgcaagcggtaaaagatatcgaaccgcctgcttttcctaaacatctctggtcagccggattgctgctgaaacggatgattatcggcttcatctctcaccctcctgatcaatttcttatcgtattttgatacatttcgtatccctatgatgttgattatatacgatacctttcgtatcatcaagacctttttgatactttttttatcatctctttattttgatacattttgtatctataatcataagtaacttagggtgttgaaaaaagagaggtcattcggatgataggcggaagattaaagaatctcagaggaaagaaaacacaggaagaagtcgcaaatcatatcggtgtctcgcgcgccagatattctcattatgaaaacggccgatctgaacccgattacgacacgctgcaaaagcttgcggattatttcaaagtgtcgactgattatttgttaaccggaaaagaaccttcagatgaagacatgtttgccgatcccgacctgcagatcgcatatcgggacatgcaggacttttctccggaaagcaagcagcaggcaattgaattcattaattatttaaaagaaaaagagaaaaaccgcaggccgaaacataaataatccgctcttttcctttaaactgcttaacgttcagccgatataaaagctgaatgtttatttttaaaagaaaagggaattgattcaaagtccgatcagggcttttctttctcacttaaaaaagaacatacgttcgaaagggtgtattcaattgggcgattttttaacacatcttgaggaatacgtcaaaaacttatattgccgcatgggaatgaccgcccctctccatattgatatgcagatgattgccaaggagcttgacatttggattcattttgaagatacgcacagtatgatgctgaagcgggacggcatgtacagcatcgtcctgaatcaaaaaaagtcacccgaagagcaatggcaggattttgcgcacgaactgtgccatgtactgaagcataccggcaaccattttcatatgaacaagctgttcagggaactgcaggaatttcaggccaaccattttatgtaccacttctgtgtgccgacctttatgctgttaaacatggagcttccccaacggagaagccatgccgttattttaatcgcagccgctttccgggtgacggcatcatttgcggaaaaaaggctggagctgtttgaacggcgtaaagcaggtattcaatttcagaagcggctcgcttgtctgttatccgacaagcggccgaatgtgtattatgaaagcggacagacacacttgcatgccgctgaagaaaaaacgccgtattttattgaaaattagcgatactccgcggcttggaacgcagccggcagaatgtcatcattttcacatcgcaggaaaggtttttgcatcatgacgctgttctcaccgtgctgcccgccacgcacttcttgcgccgcatagcagctccagtaaatataagaacgggccccctgttcatttatcataaaaaccggccttcacggcttctacataccgaaaaaacagatcggttggcgtatatttttctccccggcagccaaaattgctgaacagcgcgtgtctctgcgccgtgctcacttccaattgcagccccattttcctttttgtccgattgacaatgttgcggggatttacacctgccagccgatcattcttctctgtcagctcggcatcaaaccccgcttcacgcagcagatcacaaatcagtcttgctttttccagatccgcgcccccgacgagtgtatttgcctttttcagatcatgatacccatgaaaagccaatccgtaatgatgggcggtcactttttctaaagccaggggttcgtcaaagcgtgtgcttgtcaaatggagagaacggttatcgcaccgcttcgttccttcaaataaataaattgagctttggtcagaaaatgcccgcaccagctcactgacacccggctcaatcctgccgccgtggggagcgaggacgatacatttacttccctctttttcttcataaataattctgtattccgattcagcagcagaaagggctgcgaaattatcatatctatctttcatgtgtaacatgctccttttccagtcagcaccagtttactctactcatctgggaattggaaacctttttatagtatgatttgatagaatacgtatcaggggggatatatcatggggttcatcaatggattgctgggcaatgcgtcgacaatatcgacggctgaagcaaaagcagaactggctcgtattctgctggcaggtgagaatgtcaacgccgcatttaagcttgtccgagatatcattgtctttacggataagcgtcttattcttgttgataaacagggactcacagggaagaaaacggagattcaatccattccgtacaagagcatttccagattcagcgtagaaaccgccggccgctttgaccttgattcagagctgaaaatttggatttcaggcgcggaacttcccgctgtctcaaagcagtttaaaaaagatgaaagcatttatgatattcaaaaggcccttgccgcagtttgtatgtaagaagaaacggaagcccggagagcttccgttttattgattacagtttttcttcaattttcgccttcgttttcgggccgtaaattccgtctgccgttaacccgctgacggattgaaaacgttttacggcatttgccgttttcggaccgtaaacgccgtccgccccatgattttttgctcctttatcaggataaaaataaagagcggataaagcgttttgcacttgttttacgtttgtccctttcgtcagcggtttcgtcactttgatcacacctgatggaagcggataggaagacacagcctgactttttgaagaagaacccgtctgagcgagcttgatcacttgtccgactgtaatgtgattcggatctgtgatatggttgatgctttgcagcgattttacgctgacaccgtgcgatgcggcgatttccgataaggtgtcgccttttttcacatggtattcagacgcggaagaagaaatagaggcttttttcgccggcatacttccgcttaatttcttttcaatcttcgccttcacttcatcccagcggccttcagacaaaatgcggtgcgggcagtactttccgttccagtcctgatgctttctgattctgtcaatcccccagccccgttctttcaaaagctgcgccgcgaacgcaatcgccagttcttctgcggctctgtaccgttcgccgcctgacttgctgtaacagatttctatagcaatcgactttcggtttccggtaccgttcgtgccgtctcccgaatgccaggcattccggtccaacggaattccctggatcacttctttgtcatcaaccgcaaaatgatagcttgttgattcgctgtttcccgtcatatagctgatttcgttagcggcggatgcgtcgtttgccgtgttatgaatggtaatatactccggcgtcatcggattcggacattttaacgcatatttatcagccgatacgagccgttttttcacttcaatccccactcttcatctctccttatgcctttttcatcaataggtggcattcgtaggacagataacttgagcatatagaccctgcattcggataaaaatggaatggatacgcatgcaaaaaataagacccttccaaagaagggtctttatgttatgtttggttgcgcgcggcaatatggaatgtgccgtccgcttgattttccaaatggctttcatggccgatcacctgtgtaaagctgaacccgacagcaacaagcagcaatcctgacaacagtttagatttcatatagacaatctcctctctggatttgtttttgggcgtgcaccattttttcataaaacgtgagcgctttttcaggctgtccgtgtttcatgtaaaatttggcagcgtcatgcgccaattcttccacatacggatacagcatgtgttcttccagaaaatcaaacgtgtgcctgacggatgcgttatccatttccttgccgtataacgcatgtaaaaattggaacagattcacaaacaattcatcattgtattcgcgggcgatactgagcccgaggcggtattgcttctctgcttcggctgtagtgttctgtttataaagaacctgtgttaatgagtaaatagaatgcggaagattatcgaacttttctgacctgcaaatggaaacggatgtctcaaaatattcggctgctttagagaggtctcccattttttcgtaacagtttccgagattatataaggctgaactgataagacggggattgccttcttgttttgcaagatctaaagcaagttctaagtggggcaatgctctttctggatactgcatgtcatcataattccctgcaataacgaattcacattggattctgcggacgttgtacgtctcatacgattggtacgtttcaagggcttgaacggcataactcatggagacgtaggtttgtttcaggttgtaaaatatctcggccattttaaaagcaaactcagctttctcgatgtcatcagaaacgagtgcaaggtttttttcagcccgtttgtaatacatcatggcgtttaggaacattttctgtttaaattcgtacattcctcgaaaaaaattaaagtagtaatcaagcagtcctgtcagtttatactggttgccttcaatgtcttccaataattctgaaaactcaggctgagaagggtcctcttttaagggcttgatgtaatccagcatgacacggtgtctgaattccattaatgaataatacagcagcagatcctgatcttcttccatatcctcgatctctctctctacttcacgtttgacgcgctccgcctcaaggacgtgaaactgccggatatgggtataccattcattaattttgagcccgacaaaagaggacggaatagtctgcttcatcctcaataaatccccccttttggaatgaccgagatatgtcatattttatcatatttgctagaaaaagaagaacgcaaaaagaccgcaattgtcgaatttcggatatccgcaacgatttatctccgtcacaagcttattgcttgtttcttccgtgccgttgatatagcatatccttgcagctttttattctgtattaaatgggggttttcacatgacagcacaaaatcaattggtcagccactttctgtcacatcgaaacgtgacgattgagctggcggaaaaaatcagccgcgaacattacgattacaagccggcagagacatcaatgtccgctcaggaacttgtaaaacacatcgtttattcttttcttatgtttgcaaacgtcattaacgacggaaacggatcagctatccagaacaaaccgaaagaagaagcggaaacagacctcgtcaaactggctgaagcatgtactgaaaaaacgacagacatcctgtcacagctgactgaagagcagctgaaccgcgaaattgacctgactgcctctttcggcagaaaaataaacggcgcggctctccttcagcttgccatggagcatgaaattcatcataaaggcaatcttttcgtgtatgtcagagaaatgggccacacggaacttccgttttatcagcaaaaatcataatccggccatccgccggtctgcgacataacagcaggctggcggattttttgttctgtataaaattttccgaaaatttaattgattaccgcctcttaatcatatataatctgataaaaatagtaggattattcaggaggcacacagatgactgtaagcattgtgtttatgggtttctttgtcggaacgcttgtcggattgacgggtgtgggaggagcagcgcttttgactcctttactgatcgttttggggatcaacccctcaatcgccgtcggcactgaccttttatataactccatcaccaaactgttcggtgtcgtttctcattggaagcagcgcaccgttcaatttaaacttgtcggctacttggcgctcggaagcattcccagcgcaacagccgccatcggtgttcttcacttgtttcccgcttttcaccagcatcaggagcagattatcaaacaggcgctcggctacgtgctgacccttgtagccatttccattatcgcccgcctttttttcgataaaaaactgcggccgaaccgctggcagcaaaaaacgcttgaagaaaagcggacactcatgatattgatcggcgtcattttcggtttcatcgtcggcctgacatctattggatccggctcattatttgcgatcgccatgctatacctgttcagaatgaaaacggcagaagtggtgggaacggatatcgcacatgcctttctgctcgtaactgttgccggtctgttaaacgcaagcttcggaagcgtcgattacctgcttgtattgaatctgttgatcggctctgtgccgggtgtgcttctcggcagcttcttttcgccgaaattctcaccgcgcccgctgcagtttgtgatggcggcgattattttaatcagcggaataaaattaatataaaaaaggcggtctgttgtcagatcgccttttcccttataacgtcacaccggacttaaagattgcaagctcccgaaaatcgtttttttcgttattgacgaattctccgcttgcaactttaataatgtattgaataaaatctcttacaatgtgatcttctgttgtttggtcttccgccaatctgcccgcgttgtaatcaatccaatgaggctttgattgaaataaatcggtatttgttgatactttcacagtcgggacaaatgtgccgaacggcgtgcctcttccggttgtaaacaaaacgatgtgacagcccgccgcggcgagcgctgaagaagctattaaatcattgccgggcgcactgagcagtgtcaatccctttgttttcagtgtttcaccgtatgtcagcacatcagaaaccggtgcaagaccggctttttgggtgcagccgagcgacttgtcttcgagcgttgaaatgccgccttccttattccctggtgacgggttttcataaatcggctgctcgtgcttcataaaatattgcttgaaatcattgatcaatcggactgttttatgaaacacttcttcactcgccgcacgctgcatgagaatcgtctcagcgccgaacatctcaggcacctccgttaagaccgtgctccctccctgtgcaatcaagtaatctgaaaatctccctaataaagggtttgcggtgatgccggaaaaaccgtccgacccgccgcatttcaatccgatgctcaattctgacagcggaatgtcctcacgtttatctccctttgccgcaaggtgtatctctttaagaagcgcagtacccgcttcaatttcatctgtgacagcttgtgattcgagaaatttcacccgatctccgttcacttcagaaagggtttccctaatcgccgccagctcattattttcacagccgagccctaaaaccagcacaccgcccgcatttggatgacggatggcgttcatcagcatttgtttcgtattctcatgatcatcgccaagctgggagcagccgtattggtgctttaaaaccagcacattgtcaaagggcgcaatgtctttcgcctcttttacgaaacgctgcaggattttctcagcgacgccgtttacgcagccgactgtaggcacgatccacagttcattccggacgccggatgtaccgttttctcttctgtagcctttaaatgtccggttctcatttgtaaaaggattgtcctcgaagcgcggtgaatacatgtattcttgcacatcggataaattcgtttgcagattatgggtatgaatatgctcgccggccgaaatccgccttgtcgcacgcccgattgaaaaaccgtatttaatgatgctgccgttttcttcaatggtttgcagcgcgattttatgcccccgctttacagggtccttcacttcaatcgtcagtccgtctgtatgcagccgctcccctttgttaaaatggcgcatggcgagaagcacgttatcgtttttatggatttttatgacctctttcatttcacttcccccttttttccgcagcattcatgtaacgcatgcttcataccccgcttatgaatgacagacagaaaaaaagccgttcgttcattcagccccggaagatgattcagattcttcccccacaatcgctcttctcctaatatggcagatgccgcttgaaacatatcatctttgcaacgggaccgcgccatttgaaaacggttaagaacctcctcgccgtctgccggtttgttcggtccgttccagtatgaatagatcatggcgctgaacgaaaataccagcttctcaggtagccggccctcctgttcgatataagccttcagcgtcggcaggtttcttgttttgaatttcgcggcggcgttaagggtaatgctttgcagataatggtggatataagggtttttaaaccgctgtaacacatctgccgcgtattgggtgacaccctctatttgcagcacagggaggatttcttcattgatcagctcttcaatgaatctgcccgtcacctcgtgctcagccgcttcccggacggtttgcagtccgtatagtaaagccactggcgccaatgccgtgtgagcgccgtttaagattctcaccttttttgtcctgtaagacgtaaggtcagacgtgatcagtgcgttcagcccggcctcagcaaaaggaagctcattctgaagctgttccggcccttctatcacccacaaataataatgctcaccaaccacaagcagacggtcttcgtatccgagaaaatcggtaagttcttccgcggtatcaacaggaaatccgggaacaatccgatccacgagggtattgcagaagatgttcgcgtcatgaatccattgagtaaaaccaggttccagctcccacagcccggcatattgaagcacggccgccttcagtttccgtccgttttcttcgaccagttcacatggaagcacaatgcaccctttctcggcgtcacccgcaaatgccttatagcggaaataaaggaacgccgctaatttcccggggaatgttttttgaggtctatcctcaagccggtcgcctttctcaaacgtgattcccgcttccgtcgtattagaaatgataaaacgaagatcctcttgtgctgccagccgtttaaaggaatcatagtcagaaaaaagatcaatgccgcggctgatggatttgacgatcgtgtgttcttcagccggttttccgtcctttatcccctgcaaaaaaagcgtaaataaaccgtcctgctcgtttaaacgttttattttctcagagcctctcggctgtacggcgacaacgcttccgttaaaatccgtcaattgattcaattgatcgatctgccagtcagcgaaagcccgcaaaaagttgccttcaccgaactgaaggactttttcaggatattgaatgtattcgccgcacatctttttattcagctgctgcaagctgtccgcctccttctgcatttatgcacacgttaacattttaccgtacgaaaaaacggatattcagacgggccgttatgtgagttttttaatggaatctcttatcatcacctcggtgttttcgtatattttttccgccgccgtatccgggtcggcgattagcgccaaaatcttctctgcgccaagtatgctgatgttttcaaccgggcgttttactgtcgaaagcctcggcgtcatgtattgggaaatgccgatgtcatcaaacccgataacggatatatcttccggaacgttcaggcctttggcgaaaatggcgttcatcgccccgatcgccatatcatcgtttgaacaaaaaacagccgtaggaggtgattgaagcgccaagagtttttccatcgcctgactgccgctttccatatcatagcggccttttacactgtattcatgcttaatcgggatagaatgatcaattaaagatgtcaaatagccttctttccgctgagaagttgacctgaatccttcctttccctcaatgatcgcgatatctctgtgtccgtttgcgatcaggcagtcgaccgcctgtctggagccttctttatcgtttgacaggatattcgtgatgctccggtcatcaatgtcccggttcagcacgacaagcgggatgtttttctcgcggatatgataaataaatgaattatcactgtcgctttggctcattaaaatgattccgtcatatctcatgggcgtaatggtttcaaagcttttcaggtcgtcaatcgcgcggacgaacaaattgtattcctcactgattgtgcggtttacacctttgatggtatcggaaaaaaagctgtgtgaggttccgtttgtgatgcttgtaaaaaacagcccgatcgtatgggacttttgcatggcaaggctttttgcatttacattcggtgtgtaattcagctgtgaagcgagctctaatattttctgttttgtatgctctttaatgtaggggctgccgttaagtgcccgggatacggttgtgtgggatacgttggcgagttttgcgatatcttttatggttaccatcgtttttcctttctttctgtatgctggcatttatttctattgtaccattaacggacagtccataaaatcacaaaagttaaggttttgcatgatgtaagtcctgaacgagctcggcatgctgccggtccgtcagtttatacattaaaccgataatcagcatggcgcacgctaaagcgaaagccgggtacagcagcagaagccctttaatcccgatcagcgtgccttttgtctgagatgcattcgggatatagccgataacgctcagcccgatgcctgaaagaaaacctgataaagattgggcgagttttctggagaagttgaaaagcgaatatgtcgtcgcctccttccgttcacccgtcttccattccccgtaatcaataatgtccgacacaagcgcccacgtaatgccgtttggtatgctgatcccgataaaagcaatgctcgctaacgccgtaaagatatatacatttgacggcagacagaaattcagcgcatcagccgcggcgctgacggcaaaaccgatcatcaccgtttgcttttttccgaaacgtttgacgagtttcggcataaacaaaacacctaaaaatgaagaaccgatgataataaaactcatgtaggacatcagctccgcattgttgagattgtactgggcgaagtaaacaagcatagcggatttaatgttatatgccgatattgagaaaatcgtcatgaaaacgacggtcagaagcggtttgttgccgataaagcatttgaaaaccgacatgacggacagcttttctttcggcgcttcacggacgataattctttctttgcagtttcggtagcagatcataaatcccgcgattccgattacggccatcattcccatgactgccgggtagccgatgtgaacgttatcaaaatgaacaagaatcgggatgacgatgacacttgtaatgagcagcgcgccgagggagcctatctggcggaatgcggaaagcgccgttctgtcctccgcatcctgtgtaatggccgcgccgagagagccgtacggaatattgacgaaagaataagcgaccccccacagcatgtaagaagcataggcgtacacaagcttccaggtgacgctcacgtccggtgacacaaaaatcaatacggtcatgaccgcaagaataatacttccgaataataagtacggcctgaatttcccccggggtccgatcttttttctgtagtcaatggccgagccgacaatcggatcagtcaaagccgcaaacagcttgctgaccaaaaaaatactgccggcgaacgctgccggaatgcctgcgacatctgtgaaaaacttcagcaaatagatctgcccgagatcaaacataaatccgttcccaaaatctccaaaaccataggatactttttctttcagactcagcttatgctccttcacttttgcggcaggtgctgtcacgacaggcacattactcataggccacctctttcattccattttttaaaagcggaaatattcctcagcattccggtaacaaatcccctcgacaatctttcctaaaagctccatatcgtaaggcgcttcgccttgttccgcccagccgccgatcagcgtgcagacaagccgcctgaagtattcatggcggggataggacaggaaacttcttgaatccgtcagcatcccgataaaacggctgaacaggcctgtgtttgataacgctttcatttgctggagcattccatctttcgtgtcattgaaccaccaggctgtgccgaattgaattttccccggtgttttcccatcctgaaagctgttgatcatgctggcgataatatagttgtcattcggattcaaagaatacaaaatcgttttaggcaattgccgctttttttcggcggaatctaacagccgggcaagcggttttgcgatacgttcatcattaattgagtcatatcccgtatcaggaccgaggctgctgaacttatttgtattggtatttcttaacgcgttaatatggaactgcatcgcccagtccagttcggcgtaaagaccgcaaagatattgcagtgtccgtgttctgaatttcttttcatcttcaaaagacacatgctctccgcttaatccggctgcaaaaatccgggccgcttcctcttcggtcgtctcggcataaaccatttgatctaacgcatgatccgacactcttcccccggcattgtgaaaaaagcggacgcgggattctaacgcatctaaatacgattggtaggtggtgacagccattccggaagcgctctccagcgaacggacccaatcggcaaaacccgggctgctgatgtccagtcctttgtcaggccgaaatccgggcagcacttgaaccggaaaatcactttctttcaacagttcgtggtatgtcagcgcatcggcaggatcgtcggttgtgcaaatgactttgacatttgatttcagaatgagatcccttgcgccaaacccgtctccctgcaggagctcattcgtttttttccaaattgccgcggccgttttttcattcaatacgtcataaatgccgaaccagcgctgcagctctaaatgcgtccagctgtacagcggattgcctatcgccatcggcaccgtttttgcccaggcgaaaaacttctcttcatctgaagcgtttccggtaatgcagcgctcttcaatgccgttggccctcatgatccgccacttgtagtggtcaccgtaaagccatgcctccgtaatcgttgcgaaggttttattttcatagatttcctttgggcttaagtgacagtgataatcaatgatcggcatgttttcggcgtattccctgtacagctttacggccgttttactatccagtaaaaaatcatcacccataaaagctttcacattttcatcctccctcttaaaaatgttaacgttaacaaaatgattcttttttattttagcttcctctttctcacatatcaatcatttttattttatttttcagaaaattgtatccgttaacattttcatacaaaaaaaaagacactgccgagaaagtccggcaatgtcttctgtgtgatcttaaggattagtaagcgaggctgaataatcctttgatatgtgttaaataacgtacgttacttgcttctttcattaaagatgccggaagacctttcagcggagtagagttcgctccgatgatggcaaccgcgtctttacgtccgaggcttgcaagcgtaccagagtttacaggcttgaatgtttcaagcgtttttccttctaagtaagcgaacaggttgtaacccacaagttcacccatctgccaagcgatttgcgctgtcggcgggtacggacggccgtccggcgcaaagtatacagcgctgtctccgacaacgaatacatcttcgtgagaagtagattgtaagaaatcgttaaccgtcgcacgtccgcggttcacttcaaggccggattcgccgactaacgggttgccttgtacgccgcctgtccatacaaatgtgttggcaacgacttttgaaccgtctttcagatcaataacgtttccttcaacatttgtaacaggaagacctgttaagaactcaacgccgcgtttttcaagactttttgtcgcgcgttcgataaggtcatcaggaagaacaggaagaattttcggacctgcttctactaatttcagtttgattgctttcggatctacgccgtattttttcgtaaggttcggcatgatgtcagcaagctcaccgacaagctcgacgcctgttaagccgccgccgccgataaggatcgttgcatcagcttcgtttttcgttttagcgtattcacgcacacggtcttccacgtgtttgtatactttgttggcatcagcagcagatttcagcaccatgctgttttcttcgagtccaggaatgccgaaataagccgtaacagaaccaagtccgacaacaagcgcatcataagtcagcttagaaccgtcagaaagggcaacttctttcttatcaactgagaaagaattgacttctgcgattttaatgtcgacgtcttttcctttcagaagtttttcaagcggcatagcaacagcctgttcagacacgttgcccgctgcaaggcggtgcagttccgtaatgatttggtgagtcgggtatttgttcacaacggttacgcgtgcttcatctttactgtaatgtttgcgaacggttaaagcagaaagaactccgccgtaaccagcgcctaaaatgacaatatgttttgacatcgtatatcctccgtcctttatatcaatttgaatctgagattatttttgtttttcgttcatgatttcaagatagctgttagcaaaacggaacagcttttgagcttgaggatctttcagcatgcgcagcaggccgaaaagtccgatcgtttcattgcttgcatccgcgcggtcttttgcttcgatcgcagtagccgccacttctttcgctgtttctttcaccggctcaagaatttctgtaagcgcacccactgtatcgctcttcaatacttcgtctgtcgctacagactgtgcaaaatcataagacttcgttaaaatatttactaactcagtcagttttggaagctgatccactaaaacagtcagtgattcttgaacttcaggttttagcagctgatcaataagatcgcgttggccttggctgacagatgcatttgtttgatcgattgtttctggcatatccgattctcctttactataagcagtatgctgatttttttggaaagggtagcctttcccccttcatgcagaaaagcatgaaaaagcaagattgtgaattcatgcacaatcatttacaaaaataaatgtttactacccagtttttcactttgccatatccagtattatttttatatcaacaaaaacaattgaataagtcaaaatttctttttcctctctgaaaatagcaaacataaaaaaccccaatttgatttactcttatataataacactttttgaacaaaatttgaacgtgaattgtttcgtttatgaaattatttatatggcgggggtgtaataacgtttcttttaggctatttttttacagaccatccgctttccccctgtcatttttcccacaattttaatagcgggcccgtttttcccgtaaaggggtcgcattccgggagcgggacacggctgattacttctggagttctatcatttttctccgtttttgtatcgtactgccggccgcccggataagccccgatcacggtaaaatcagaactgcccgacagttttttatgtccggtgccggccggaatgaccgctgagtctcccatttgaagaacggcgtccgctccttgttccccgccgaacctcaaaaccgcgtttccttttaccgcgacaagaacttcgtgcgtggtgctatgaaaatggtgatacggaaatactccgcccgtccagctgttcgaccaatcgtgccggctgaggacggactctgctttctgcaccgtttcttcattaaataccgctttataaataacaagcggaagattcgggttattcggaatgcggccgtcatcttcaaaataaagcacttgaatatcctctttctgcattgttttcacctccgtatatgtctgtttcccattcatcatttgttaaaacgctattttctcatattccattgcgaagcctgccggtgaatagtatagtataaaaaaatatgtgtcaaatgagggatttaatgaaagccatcgtgatcggaatattggcatctctgttttttgcagtcacatttattttaaacagggcgatggagctttccggcggaagctggatgtggagctcttccctgcgttttctttttatggttccgtttttatttttgatcgtttatgcgaaaggaaaatgggcgccgctctggcatgaaatccggaaaaaaccgtttttttggctgaagtggagttttaccgggttcgtgcttttttatgccccgattacgtttgcggcggcatatgggccgggctggctgatcgccggcacgtggcagattacaattgtcgcgggtgtgcttctgtcgccgtttttctacgaaacaaaaaattcaccggcgggcccggtttccgtcagacaaaagatcccgctgatttcgctggttacttccgtcatcatcctgatcggagccggtctgattcagcttcagcatgcgggttctctgtccggccgcacggtactattcagcgtggtgccggtcgtcattgccgcttttgcctatccgctcggcaaccgcaaaatgctggaacaatacggcggaaaactcgatacgtttcagcgggtgctcggcatgacgctcgcaagccttccgttttggcttttgatcgccgctttcggctggcatagagacgggcttccgtcaatgggacagtcattccaatcctttatcgtcgcactcagctctggcgttatcgcaacagtattatttttccgcgccaccgatatggtgaggaatgagccgcagaagctcgctgctgttgaagcgacgcagtccggagaggttctttttgcactgatcggcgaaatcgtctttttatccgcggcgtttccgtcacttctttcatttgccggactgttcattattattgcgggaatggtcatgcatacattcgcttcccggcagacagaccagaaaacggctgagcaaacggcagccaatctcaccggttcctgatttttttacgaaaggtgtcctcctgtatgaaagaagaaattccggcaatatcttttctgtcagccggcaaacgctttgaacaaaacaatacgtcctttgatgtcctcagccgtgtaaccggacatattcaaaaaggttctatcacggcgttgataggcccttccggcgcaggaaaaagcacattgctgtcactgtgcaatctgatgaatacacctgatgaaggggaagtgcttgtattcggaaaagaaataagacactgggacatcagagagctcagaaaaaccgcgggccttgcatttcaatcagctcccgtcctcgagggaacggtgcgggacaaccttctgctcgcagaaaaactccacgggacacagcactatacgcctgaagagctcgcagattttacagaccttccgcgcgggcttctggatcgaaatgcaaaagaattatccggagggcagcggcagaagctctcattagcgcgaactctcgccggactgccgtccatcctgctgctggatgaaatcacctcggcgctggacccgtcatccgttctcaccattgagaaactgattacgaaactccatcggcaaaaacagcagacggtcctgtggatcacccataaccttgaacaagcggaacgattatccgatacggtatggtttatggctgagggtcggcttttagagaccgcggaaacgaaaacgttctttaaggaaccgaaacacgaaaaggcccgggcgcttttacaagggagcgggtgctgatatgaatgatctttctctattattgacaagtatatttgtcattattgctttattcctgtctaaatcttttaaagccggcgtcgaaaaggatatgatcgtcgcaaccgtcagggccgtcattcagcttctcatcatcggctatgtgctgtcgctgatttttcgcggtgatcacccgatatttatcatattaatggtgcttctcatgctcacggccgcttcgcacaatgtctccaaacggaataaaatgcggatcggctcattttggcgcgtttttctgacactggcgatcgcggaaaccgtgacgcagggacttttactgacccttcacatcattccgttcacttcaagatatgtcattccgataagcggcatggtcatcggaaactccatggtgctctcaagcctgtttttaagcaggctcagttcggaagcagacctgcggaaagaagaaatccagctgattctctctctcggaggaacgcctaagcaggccgtccggcagatattgacgtccagtatgaagctcagtatgatcccgacgcttgaaagccagaaaacattgggtctcgttcagcttcccggcatgatgacggggcagattttagcgggggctgatccgatacaggcggtgcgctttcagctgctgatcgtttttacaacgatggcctccgctcttcttacatgtatcatactcagcgccttgacatatccttcccttttcacggaacactggcaattaaaaaaattcagcagggaagcgtaggcttttttccctgctgaatgatggtttatgacaaggtcagagattcatagtaacgggataattcaataatcatcgctcccatccgctcaatgtccggagcaaggaccctctttaccccttcatcccggatcgcttcagccgtcactttgccgactgcggcggcaagcacttgtttttcgaatgcctgctgcaattcttttgtgatccctttttcttttgcataatcaaagagagaacgcacttgaatggctgtcgtaaaacatacggcatcgacctctccgtttaacagctctcccagcagtttatcgaccgtctccctttcaggcggaatatgctgatacggcagaacagggaatacctccgctccgtttttctcaaggaactccgttaagaccggcgctttttcgccatgaagctgtatcatgacttttttatctttaaagtcaaatcgttccaaggagcggatcagccctcttgttgtaccgtcttcatctgaggcatgcggcgtgatgccgagtttttttaaggccgcatatgttttatagcctctgcagccgattttcgcttcatgaacggccgctaaaaattcttctttcagaccgattttttccgataccgacaataacgtttccgtaccgatgcctgtggtgaatatcacccagtcggctttttgcccggcaaatgttcttacgtcgggttccatttgatcctccgccaggtatacggttccttggagggaacggacgaccgccgttccgccctgcttttctattaatcttgtgatctcttctgttttccgcgaaccgccgatggcaatccgtttcccgttcaatccttttcccatcgctgttttcttcttcccttcagatgccgggcgccctatggcaggccgtcatttatttctattattgttacgcaatcagccgggaaaatcaagctatgctcccgttgaatcccccgtgcagttgctgtatcattaaccgggcagaacgatttgattcgcggagggattttcaatcatggaaacaaaaaaagagttcgagacaaaaggatacgatacttcggtcatttatgagttcaatgaatatcctgatgttcacagcggccgatgtgacaattgcgactacacgctgtttaaaagctcagtgaagggcggaaaatttttgagggaatgccggagatgcggcatgaagaaaaacatataacaaaacaggcagccgtcttccggtgcgctgcctgtttctcaatcaattttcgacggccgcctttttcaaaaattcttcaatggcacaaacagcctgtttggggccgccggtttcttctattttctgctgcatgcttttcacgcggctgaggatgtttttatcgctgtatacgttctgaacgtctttttgcaaacgggccacagtgacttctttcggcggcagatgcacgccaagccccaattcatccacacgctttgcggtgacctcttgttcgtgcatttgcggaacgacaacgagcgggacacccgcattcatcgcttccattgtactgttcatcccgccgtgagatacgaacagctttgctttctccagcacatcaagctgaggaacgtgctggcggatgataaagtgatcggggacatccgaaaaactttccggatcaattgttgtgccgactgacataataacccgccagtccgagtcccgaaacgcgtcaatacacatctggtaaaattcaggccaggcgttaaacgccgttcccagtgagatgagcataagcggacggtcatcggctgcatcaatttccagacttcccgtatttgtgcgttctccaagagacggacccacaaaacagaatcgttcatcaaaggtttcctgtttcggctgaaaggcccttggcataaagacaatattcagtttttcaggcataaaaaattcttccattgtcatccgtttcaattgttcattttcaatctgctcctggtattcttctatcgcctgtttggccgcttccagtgtttcttcgtctcttcctaattgaaaatactcattcattgcatagctcgggcagaactttacggccgggatgccgctattatccgcaaacaattttccggcaagagctaaaaaatcaaacaggacgatgtcaggaaggtcgtctttgtacagctcttccagctgcggaagcacttcaaccgcttcttccagaaacatcacaaacgcatcatttttatttacccgttcttttatcgtctccgggtccgcctttatgcttgtgcggtataaaacgggaatggcgcccgttttggcaacggaagcttcgaattcctcagtcgtagcgaatgtcactttatacccgcgattgacaagttcctcggctacaggcagcgtgggattgacatgaccgtgagcggccacattaataatggcgatgtgtgtttttctcatcatttttcttctccctcattttcgtttatctccgcttctaaagactccagcccgtacatgacactgtttcggatcggctcaatctggaccggctcaaggtgtgaaaaggcttttacaattcctttcagcgccacttccgcttcaagtctggcaagcggggcgcctaagcagaagtgtacgccgaatccgaaggaaaggtgcggattcgattggcgatgaatatcaaatacgcccgccttctcaaatttgttttcatcacggttggcagatgcaacgtagcagagaacgatctccccgcttttcaagcggcgtccgcgcagttcagtgtcgtgccggaccgtccttctgacaaacggagcgggagcgcgaaaacgcagcgtctcttccaccgtttgcgcgatgagagaagggtcctgtctcagctcttcataaaggccgggcgtctctaatatgctgtaaaacgcatttgaaatgagattagtcgttgtttcatttcccgccactaaaagcaggttgcaaaacgggatcagatcttctgccgtgagcttctctccctcttcttcctcttttatcaaaatagaaataatgtcttggccgggctgttttcgtttactttctattatttccgcaaaaaacgccgccagctccgcctcacattggtcacgttcctgctgatttttctccgccgcttcaggactcgcatctttcggcatgctgacgagaatgtccgaccattttttaaactgatccatacgttcggacggaacgcctaataattctgaaatcaccatgaccggcaaagggtaagagagatctttaacgatatcaatccgccctttgttctttgcctgtttcaggagatgatcggtaatgtctttaattctcggctcccattccttcaagacgcggggagtgaaagcgcgattgacggcggatctgatttgggtatgcttcggcgggtccatattcagcatggactttgcaatcgagcttttcacatcagtcatgaggcttgagaacgtctctttatcactgatgacttttttgacatcatcgtataaaaacacactccaaaccttcgtttcttcatcaaagtgtatagggctttcccgtctcattttttcataccaaggaaaagggttgtatacgtccaggccgttttttcctttcatcagggttctttggatggcttgtctcgtgctcctcagcttactcatgtttcatcactcctgattgtttcatatttgaatagttgacgtaccttgaattttatcctagcacatattttcaatttttttctattcataaccttaactattaacataacacaacaaaagtcatgaatccggaggtgaaatttctcccaagaaaacagcataagcacgcaaaaaacccgagccttcggccaggctcgggagatatgttcactcattcgtctgcggtttctggtgctgcttttggtcttcaggaggctgcgtatttctttccatatcgtccgtatcagcgcccatgcctttcaggaaagaaaacagcagagtgacggccttgttgatttccgggtcttttaaagcgcggacgatatcaaaatacccggtcttcctgccgctgtctttttcctcgacggcctttgtgacccccgcattgattttaacgataaacggctcaagctgttttacatcgagcatgccgagaacgccgcttaacagcaggagatttttcagcatattggccgtttccggattattcgccttcttcacgaggatatccatcactttgtctccctggccgaagagcccgcgcagaagcgccaaaacgccgcgctcgttcatgtgctgaagaatgtgcagagattccaaaatcgcgtctttatttcgtaaaagagccgtctcgatctcttctaagtccttttttcgtttgtcttcttctgtgacggtctgttttcggatgccgctgattgctttagccattttgctgcttccccctttttacggcgtctcccggaaatacataatctttacgcgcccatttccgatcaacccggacaccgatctgcggctgcgggtttccgtaacggaaattgattttcggaagcggattaacgccttcttttttcaaaatctccatcttcgctgatgtttctttataagccggtgtatcggtatccttatccgcatagctgcttgtcaaaaggttaatggcggcgtcttttgaatcgttcatcggaagatagacttgtttaccttttaccctgtctgtgatgacgcatttgactttcacatttccgtacggtgaagtcagacggacaagcgttccgtcttccagccctctttcttcggcgagttcgggcgagacctcaaggaacacactcggtgttttttcggatattccttttgatcggtaagtcagattcccttcgtgaaaatgctcgagcagcctcccgttattcacatggatatcatattcttcatcaaattctttcggctcggtccactgaacgggatatagaatcgctttgccgtctgaaaacgggaacttgtccgtaaataaaagcggtgaatcggttccgtccgctgcaaccggccattgcagtgaattgtagccttcgagacgttcgtaagtgacgcctgcatagagcggcgaaagcattgccgcttcttccataatgtctgccggatgttcatagtgccaatcagcgcccagacggttggcgatatccgtaatgatctgccaatcaggctttgaatcgcccagcggttcaaacacttcgtaaaggcgctgcaccctccgttccgtattcgtaaacgtcccttctttttcaaggctcgggcttgccggaagcacgacatcggcgaactcggccgtacgcgaaagaaagatatcctgcacaacgaagaaatcaagcttttcaaatgcggcatgaacatggttaatattggagtcgacaagccccatttcttctccttttaagtacatggacttcagttttcctgagtggatgccttcgatcatttcatgatttgtcattccgatttctttcggcaagtctgttccccagccctgctcatactttttgcgggctttttcatccgttactttttcatagccggggaagctgtcaggcatactgccgaaatcactggctccctgcacgttattatggccccgaagcggatatgagcctgcgccgggcttgccgtaatttccggtcacaagaagcatgttggaaatggccgtgctcgtatcacttcctccgatatgctgggtgacacccatcgcccacagtgcgcacacgctgccggcttcatgaatcatccgggccactttgattagggtatccttgtccacaccggtatgtttttccgcatattccattgtataaggttcaaggcttttcacgaattcatctaatccgttcactctctccttcagaaatgcagtatccgccaaatcgtgatccagcagatatttcgatacggcattcagccagacaatatctgatccggcacgcggctggaaaaacacatcggagcgctcggccatttcatgttttcgcaagtcagcgacgacgagcttctgtccgtgcagtttatgagaacgtttaatgcgtgtggacaggacggggtgagactcagacgtatttgagccgataatcagcacgagctcagctttttctatatctgtaatcgaccctgaatcaccgccgtatccgaccgttctgaacaatccggccgtggcgggagactggcagtagcgtgagcagttgtcgacattatttgtgccgatgacggctcttgcaagcttctgcatcacgtatgattcttcattcgtgcatttggaagatgtgataaaggcaagtgcgtccgggccgaaatgttcttttatatcggtaaatttatcagcgatcagctgcagcgcttcatcccattccgcctcccgaaacgagtctccttcccggataagcggtttggtaaggcgcttttcactattgacgaaatcccagccgaatttccctttcacacacgtcgaaatgccatttgcgggcgcctcggcctgaggttctacctttaaaatgtctcttcctttcgtccatatatcaaaactgcagccgacaccgcagtaagtgcatacggttttcgttttcttgattctttcatcccgcatggccgattccatgtccgatatggccaaaatcgatccgtatccggtttcgacgccttttgtgatgtcaatcatcggacgaagcgtctcttggttaatgcctgttaaataccccgcttcgccttccatgcctttttccatcatggcattacacggacataccgtcgaacaatgtccgcaggaaacacatgatgattcattgatcggcacatcctgatcccaaatgacccgcgggcgtttccgctcccaatcaatgcttaaggtttcggttacctgtacgtcctgacaggcttcgacgcagcgtccgcacaaaatgcactggtcgggatcatatcggtaaaacggatttgattcatctttaggatacggtttttgatcgaacggaatgctttgatgattgattttcatttcctttacggtattatgtacttcgcagctcccattgttgtaatcacagaccgtgcagtacaattcatggttgtgcaaaatgttgtccatgccgataatctgcgcttttttcacatcggacgaaagcgtatcgatgacatctccgtcctttatttgcgcggaacacgaacgcaccagttccccgttaacattgacgatacaggtatcgcacgtttcaatcggcccgagactcggatgataacacacgtgcggcacgtcaattgaactattgttcaaaagctgcaaaacggtttgaccgtcccgagcttccatttcaaccccattgattgtaaccttctttgtatcagccattttcttttcccctttctgtacccctctatacatcctctatgattcccagccggcctttcactaaaacatctcgtttatctcaggaaacatgcgggtatgagcggtaaaaaggaggcgttcacatatgttgaagaaaaaaacactcgtcaccggattatcggcggtgatgctcacgggatgcgcattcggagcagaagcattttcggatacacagcccgtccatgccgcagccgcttcaaaaacagaaaaccaacgtgcacaagaactggtgaacagcctttatcaatcggcgtttaaaggggaaatgccgcaaaatgtgaaaggcctgaaagtcaaccaaagcacaagacaggacgtttacgataaaatcggcgagccggaacaaaaagcagacagccgcaatctatttgatttatacagctggaacatgggaaaccccggttatggattttcctatcataaaaacggaaaaatctcggaaatacgctatttcggaacaggggtcgagcggcgcttaaacctcgggagcgtcacacctgacgtcttaagcaaacaaatcggcagcgctgacaaaatcctggcagtgccaaaaacgggcgaaacagattacgtctaccatacggggcagtatgagctccgcttcgtcatcggcagtgaccaaaaagcagaccacgtcaacctaaaagccagataacgcaaaaaaagcggcctcccgggccgttttttcatagacagcttctccgtcgttccttacaatacatgggagtacaaaaaaggggaacagtgtgaagtgaatagacatccattgacatacggaatatgtaccgtttttatcatcgccctcggtttgctgtccagaaccgcatacatcaccgccctattgcccggcatcataaacgcttatttaggagatgccttgtgggcggcaatgatttttacaggattcgggcttctgtttcggaacatccggacggaaacagccgcatttttgagcctctcgttttgctgtctgattgaatgcagccagctgtatcacgcgccttggattgacgcaatcagaagcagcacgctcggcgggctgatcctcggctggcaatttgtctggagtgacattttcgcctataccctcggggtatgcgccgccgcatttttagaatgggccgtaaaaagaaaccgccagtccccttcataatcggagcatgccgccgatatgaagggataaggaggtggaagctatggatatccctgcgttatcaatcgctatgcaccaagcatctctggcgcagaatgtaaatatcgctttaacaaaaacggtcatgcagcatgcacaggctgcggcggaagaaacagtgaaaatgctgccgtcccagcacccgactgccggacattcaattgatgtgaaagtgtaaaaaaagatgccggatgataaccggcgtcttttttttgcccgttgtacgtacaccatacccggcatacaggaataaggtaaacggaaccaacatttgaaaaggaggttttcctcttgtacgatcctttctatcatgaatacacagccgagagccacgaacgggtgccatatcattatccgcggccgccttattatttcccaagaccatatccatactatccgcggccgccttattatttcccaagaccgtatccatactatccgcggccgtatatcccgttctatccctggtattaatgtttgaaaagaaatgactgcagacaggaggcttcccctgtctgctattcaactttgaccgacagaatatacgggagagcttgaactttttccattaccgccgctttcccgcttttgcttttcacccttcccttcacttcaagcaccgccttattcaattcataggacgtaataagaattcctttttcctcaagagaagttaaaatatcatgcatgacggctttctcctcaatcctgaaactgacagacaaagaatgcgccgccggtttaaacagaaaatttaacagttcaagcccgattaacgccaaaatcgtgccgctgatgccgatgacatacatacctgccccgatcgtcagcccgatgcccgacgtagcccaaatccccgcggccgtcgtaagcccccgcacgacatgccgctgcaaaataatcgtgccggctcctaaaaatccgacgccgctgacgacctgcgccgccacccggctcggatcaaaggacgtatggctgttggataacaaatcaaaaaagccgtatttggaaacgatcatcatcaaggcgctgccgacggccactaaaaaatgcgtcctcaaaccggcttccttcgccctgaattctctctccaatccaataagagccccaagcagacccgcaaccgccagacgaatcacaaaatcaagttccatccgtctctctcctttccttatcttcttacccgctttttatcccccgtatctttttctatcagcacaagactgccctgctgaaaaaaactgcatttgaatatatactttggttctttatcatattgtcagtgcccttatttatatgcggaaggtattaagctggcgtttccaaaataaaggaaataacttattgagagtatatgaaacaagtttattcgttgaagctgcggccgcttgtctcttccaatcttctaaaaacagaacgaatgccgctccctcatactcaaaaattgctttcaatccgcaaaaatatatcgtaatataagatataatcttaataaacgatagaaggtggatgataatgtcaaacgaaatcatgcgattaaatgacctctggacagatatttattaccggctccgttatcagcaccatgaaaaaatcactcaccaaggtgtacggattctgcaagtcattcaaaaagagaaggcagtcggaataaaagacattgccgaagcgattcaagtatcacataataccgcttcggaacatataaagcggttactgcagaaaaagtacgtttataaaaccagaagtgttgaggatgagcggaaagtcattttaaaacttaccagtttgggggcggatgtcctttaccggcattccggtcttgatgaagaaaagcttaaacagcttctttttgacagcatgaataatgaagaaagaacacttgtcctaaaagcattcagtttgatgaaggagcgtgctgaagatgtttacgatcgttaaaatcattgtctccgctgctattattgggattatcactgaaatatcaagaagaagccccagttatggaggtataatagcggctttaccaattgtcagtatgctgagcatggtttggctgtacatccaaggcgaaacgaaggagacattaagtcattttgcattcagcgtggcttccggcatcccctccacagtcattatgctggtcattatcggcatcgcccttcgccattcactgtctttcattgccgcatcagggcttggacttacaggatggctggttttcttgtatgctcaggattttatcgtaaaacatataaacagtcagcaataagcaccttagcgcttgtttgtaaatacgaggaattaaaaaaacagggatacccctgtcttaaaagtgactccgattaaaaagcgaaacccctttcttcacgagaagcagacaccgccgaacacaaaaacatcccgtgttgcgaacggagtccgcagcctgtacagccatatcggcatgaagaaccggctgatctctcaaacagaatgtccggcaatcacctcaaaaaacgaggtgaaatctgtcagtatcccgtcatccgccagctgtttttcttcaaatagcgcgcggttttttccgagcgggtcaatggccataatcttgcctgcacctgcttttttcgccgctgtgagccccgaaaaggcatcttcaatgactaagcattcttcaggcctgaggcctaacttttccgatgcgatgagaaaaatatccggcgccggttttccggggaagctcccgtcatcaaacgtgactttgtcaaaatcaaaccaccgatccaactgaaagacgtcaaagtaaaactcgacattttcctttaccgtagccgtggcaatggtcatcggcgtttctgattttttcagatggttcaatacgccggtcagtcccttcgtcagctttaactcatctttgttttcaaggcataattctctgtagtaggcttctttttcaaaagacagcttcttgatttcttcatttgttaaatcgccggaaataaaatacgtcaggatttcactgtttgttctcccgtgaatgttaacgaaaatgtcttcatcagaaatggttttcggcgcgtattttttcaccatgaaaaaccatgctttttcgtgcagatgcgaatcttgaaacatcgtgccgttgaaatcaaaaataacccctttcatcgaaccgcccgccttttttatttttttgcgattttgacatctacatattgctcgtaatgaatttgaacatctttcatcactttatcatccgtaattagataatccatatcgtgcaagttatagaacacgtaaaaatcttcccggttgaattttttattatccgccagcaaaaatttcgtccgcgaattattcagcgcgatttgatgggcttccccttcttcaatgctgtaagaagaaatctcatcattatgtatgccgttggcgctgatgaaggctttcgtaaaattgaatttctgcagattgccgttcacgatgggcccgacgaaggcaccggtattttttcggaaatcgccgccaatcagaatggtatccgcagtgtcaccatgctttaaaatatcaaatacgggatagttgtttgtgataatcctgattcgcttatgcagcaggtgtttggctaaaagttcaatcgtcgtgccgggccctaaaaaaacggtatcgccgtcatttacatatgaagctgcgagttccgcgatcttccccttctcatccatttgaacacccagtttttcattatgcgataattcgtgatcaatggaataagatatgctctgtgcgcctccgtgaatacgtacgatttttccggccttatccagctcgtccagatctcttctcactgtcatatcagaaacatccagttcatcgataatatcactcaccgtaataaatccccgcgagtttacgatatcgatgattttcaaaagacgctctttttttaacatgttcaatcatcccctcaactttacacacaatctaacacactgcggcaacccggtcaacaaaaacaaacactaacaaacaacataatcaacatataaaacagcgaaaaacttataaaacccctatgaaaacagattttatttctttatgaagctattgacaacaaaaatgtatgcgtttactattaaacaaaagataacaattacaaacattaacaaacttcaattcacacattggcgaaggaggattcagtaatgctcaaattacctcatgactttattttcggcggggcgactgcggcatatcaggcggaaggcgccacaaaagaaggcggcaaagggcctgtggcctgggatgaatttcttgaaaaacagggaagattcagccctgatccggcaagtgatttttaccgccagtttccggaagatattaaactatgtgaaaaattcggaataaacggcatccgcctttctatagcctggacgagaattttccctgacggcacgggcaaaatcaatcaggaaggtgttgattactatcatcgtattttctcagagtgccataaacgcaacgtcaccccttttgtcacgctgcatcatttcgatacaccgaaaggattatttgaccagggagatttcctcaaccgcgctgcaatagaagcgttcgtcagctatgcggagttttgctttaaagaattcagcgaaatccgatattggagcacgtttaacgaaatttatcccacagccaccaaccagtatttactcggggttttcccgccatctgttaaaagtgatatcacaaaagtcattcaatgcctccatcacatgatggtagcgcatgcgatgaccgtcaatctttttaaagacggcggctatccgggagaaatcggtgtcgtccactcattggaaacaaaatatcccgccagcgacacagcagaagaccgccatgcctgttttctggatgacgcgttatcagtgagatttctcctcgacgccacctacctcggttattattctgaggaaaccatgcgggctctggatgaaatctgtgaggcaaacggcgcttcatacgagttttcagacaatgactttgacgtgatgaaaaaagcttcaacgcgcaatgattatctcggcatcaatcattatcaatgccatttcgtcaaagcgtacgacggagaaaccgttattcaccataatggaacgggcgataagggcacttcggtctataaagtaaaaggaatcggcgaaagaatttacaaagaaggcctgaagcggactgattgggactggcttatttatcctgaaggcatgtatgacatgctgatgcgcatcaaacgggactatccgcaatataacaaaatgtacattaccgaaaacggcatgggctataaagatgagtttgaagacggcatcattatggataaggcaagaatcgactatttaaaagtctatttagaagccgtcagtaaagcgattaccgacggagtcaatgtaaaggggtacttcttatggtccttaatggatttattttcatggaccaacggctacaacaaacgttacggtcttttttacgtcgactttgacacccaaaaacggtatccgaaagaatcggcctactggtacaaacttgtaagtgaaacaaaaacaatcatttaacgatcatacatggtgaaaagagtctcttttcatcatgtgtgccgtctttaggaggttttttcatgacaaaggaagaattgcagatgctcggttttgaaatcgtcgcctatgccggcgacgccagaagcactttattgaaagtcctgaaagaagtccgtgccggaaacttcgaaaacacggaagcagcattgaaaagcgccgatgaaaatttaaccctcgcccacaatgcgcaaacgaaaatgttagctgaagaagctgaaggcaaggacatggaattaggatttattttcgttcacggtcaggaccacttgatgacaacccttttgctccgtgatcttattcaggattttatagaactctaccgaagctgccgataaggagtggaaaaatgaacggtatcatcaagcaaatcgaaaagggaaaaccgttttttgaaaaaatctcaagaaacatttatttaggcgcgatccgcgacggcttcttaactgccatgcctgttattttattcgcgagcattttcatcctcaccgccgctgtgccggaagtgttgggtttcacttggcctaaaagtgtttctgaatggctttggaaagtttataactattcaatgggcgccctcggtctgatcgttgcggcaacaagtgcgaaatgcctgagtgaatcaatgaaccgaaaaatgccgaaaaacaaagggatcaaccccgtttcagcgatgcttgcttcagtcgtcgggtttctcattttaagcgtcactcaaattgatggcggattctccacggaatacctcggcacaaaaggtcttttagctgcttttgtatccgctttcataacagtgaacgtttacagattctgcgtgctgaaaaatattacgattaaaatgcctaaagaagtaccgggtaccatttcacaaacatttaaagatgtttttccgttcgctttttccgttttggccatggtgatcgttgatttattgatcaggaacacgctgaacgtatcgtttgcggaggctctctcctctctcttatcgccgttttttaccgccgcagacggttatctggggatttgtgtcatttggggaatgatggcgctgttctggtttgtcggcgttcacgggccttctattgtggaaccggccatcgcagctattatttacgcaaatgtggaggcgaacctgcagcttcataatgcaggtgagcaggcgtccaacgtgctgaccgtcggactcgggaacttcgtcggcacaatgggaggaaccggcgcaacccttgtggttccgtttatctttcttcttttcgcgaaatccaagcaattgaaagctgtcggaaaagcatccgcggttccggtgtctttcgcagtaaacgaacctctgctctttgctgcgccgatcattttaaatccttattttttcattccgtttgttgtaacgccgatggtgaatgtctgtctgtttaaatttttcgtggatgttatcggaatgaacagttttatgtatgttcttccgtgggccaccccggcgcccgccggcttgattctcggaaccggcatggggctctcggcttttgtgctgacggctgtattaatcattgtcgatttcctgatatacctgccattctgtaaagcttatgacaaagtattagcggcgaaagaagcccaacacaccgagcctgaaaccgcgccgcaaacattacagcccgccatggccggcgcctccgaagacgcgtcctccgtcatcagcacaaatcttcaggaatcctcatccgccttggaacacagcaccaatgtgttagtgctgtgcgccggagcgggaacgagcgccatgcttgcgaacgcactgacagaaggagccgaagaatataacgtgccgattaccgcctcagcaggcgcctacggatcccattacgacatcatgaaagacttcgatatgatcattttggctccgcaggtcggctcttattacgatgacattaaagaagatgcggaccgcctgcaagtgaaactcatcgcaacgaaaggagcggaatatatcagcctcaccagaaattcacaaaaagccattcagttcatactggagcatacctcaaaatagaatcggaggtttatcatggatgccaaacttttaaaatcaagattcgaagacattttcaagagaagtaacggagaactgtttttcgcacccggccggatcaacctgatcggggaacatacggattatataggcggccacgttcttccatgcgcgatcacgatcggaacttatgccgtatgcgcaaaacgcggagatcaccagatccggttatactcagaaaactttcctgacagcggcattgtctgccttgatctttccgccacagcatacaaaaaagaagacggctgggccaattatccgaaggggatgatccattaccttcttaaagtcggcggccaaatagacagcggaatggatattctttttcacggtacgattccaaacggagccggtttaagctcctccgcttctattgaaatgttaacaggttccattttaagaaagttattcagcctggatgtttccgatactgaactggcgcttatcggaaaaagagtcgaaaatgaatttatcggcgtgaattcaggcattatggatcaattcgcagtgcaaaaaggcaaaaagaacatggccattctgttaaactgcgataagcttgagcacgaaatgattccggctgcttttaacggatataaaatcgtcattatgaatacgaacaagcgccgggagctggcggcttcaaaatataatgaacgccgcagcgaatgtgacgaggctctttcagaactgcggcaatatcggaatatcgcctcacttgcggaattgacgggagaagaattcaacgaactcgaatcccttctctcctgtgaaactttgcgtaaaagagcccggcacgcggtcaacgaaaacgagcggaccctctcagccgcggaggctctcaaatcgaatgatttgaaaacgttcggcgagctgatgaatgcgtcccaccgttctttacgcgatgattatgaagtgaccggtgacgaattagacgcgctggctgaagcagcctggaaagaaggagcactcggagcgcggatgacgggcgcggggttcggcggctgcgccatagccattgtggaaagtgaagaaaccgccggctttatccgggccgtttcatctcactaccgcagcaggacaggtcttgaagcttctttctacatcgcggatataagcgatggcgcggctgaatggagggaaaaataaatcatggcgattctcgttctcggcggagccggctatatcggttctcatgcggttgatcaattattaaacaaaggatttaaaacgatagctgtggataatctccagacaggccaccggaaagctgttcatgaaaaagcagttttttaccatggagatatccgtgaaaaaccgtttcttcgctctgtgtttgcgaaggagaacgtaacaggcgttctccattttgccgctcaatcccttgtcggcgaatcaatgaaagaccctctttcatatttcaataataatgtgtacggtacgcaaattacgctggaggtcatgcaggaattcggagtgaaacacattgtgttttcttcatccgccgctgtatacggcgaacctgaaaaagtgcccatcacagaagacatgcccgaaaagccggaaagcgcatacggcgaatcaaaactcatggcagaaaaaatgctgaagtggtgtgaaaccgcctgcggcataaaatatgtctcgcttcggtattttaacgttgccggcgcgaaaacggacggttccatcggagaagatcatcatccggaaacccaccttatccctatccttttacaaaccgcgctcggtcagcgcgaggaggttttgatattcggcactgactatgatacaaaagacggcacgtgcatccgcgattatgtccatgtttccgatttaatcgatgcccatattctcgctctggaatatttgcaaaacggcggagacagcggcattttcaatttaggatcaagcagcgggttttccgtatcagaaatggcggaagcggcccggcaagtgaccgaaagagacataaaagtaagagcggctgcaagaagacccggtgatccaagcgccctcatcgcttccagcgataaagcgcggaacattctgggctggaatccgaaacaaacggacatatcggaaatcattgcgtcagcatggaattggcatcggcaacatccaaacggatacaaggacaaatgaaatggaggcggcggtcattgaagtttttgaatcagtggcagggtttctgaaagaaagcactgtcttaggcgacataaatgaaacagatgtgatttatacaagaaacagacttctcgatctgctcggactgacggattatgcagaaccgaaacatatcaagaaacaaaacaggcttcactatttggacgaaatggtgaaagacgcggtaaaacggtcaatcataaacgatacgccggctgaaagagacatgctgggaagcagaatcatggacgtgatcacaccggccccttctctgatcaatgccgcgttcagcgaattgttatcagattgcccgaaaaaagcaacagattatttttatagactgagccaaaacaacgactatattaagacgcgggccattcgaaaaaatatcgtgtaccgctcatcaacaccttttggggcattggacatcaccattaatttatcaaagcccgaaaaagaccctaaagacatcgccgcggtaaaaaacagtccggaaaaccggtatccgaaatgcctgctttgtatggaaaacgaggggtatgccggaacaccgcatcaccccgcccgttcaaatcaccgcatcatcaggcttgacttagcgggagaacagtgggggtttcaatactccccttatgcgtattacagcgagcatgctatctttctatcaagcgtgcacaagccgatgaacatcagccgcgacagcttcagaaggcttctggccataacggaaatcttcccccactatttcgcgggatcaaacgcagacttgccgatcgtaggaggttccattctttcacacgatcattatcaaggcggcgcccatgagtttccgatggcaaaagcgggttccctctacccttttcatatgcgtcattttccagacgttcaggccgaagccgtgaagtggccggtatcagtgatccgccttcgcgcaaaagatccggatttgctgacagatgccgctgcgtatgtttttgaaaagtggcgggaatattcagacgaaaccgtcagcatcatcgcaaagacaaatgaaccccataataccgtcaccccaattgccagacgcaggggaacggattttgaaatcgatctcgctctcagaaacaaccgcacctccgaaaattatccggatggcatttttcacccgcatcaagatgtgcatcacatcaaaagagaaaatatcggtctgattgaagtgatgggactcgccgttttacctccccgcctgaaagatgagctggcagaagtgaaaaagtatttactgaatgaacctcatgacatcaaagatattcatcttccgtgggctgaaaacatcaaagcggataaagacgtgacatcggagaatgcagccgctgttttacaaaaagaaaccgcgaatgtatttttacgcgcactgaccgatgcaggcgtttttaaaatgacacccgaaggaattcaggcgtttcagcgtttcacgacgttattggagaatggcagctgaaacattcagagtgaaatcaatcaacaattttttttatcaggaggtattgtgatgttcaaaaaccgattgaaacgtgtatttgtaaacgcaatctgtctttctctcattttcactgcttttacattctttgagaagtctcctaaagcaaaagcggaagccccgtttgcctatggcgctgatataggatggctgaaacaaatggaggacgaaggtgtgcgctggctggatgacggcggaaaacagaaagatgccttgcagattcttaaagatcacggaataaatgccgtgagactgagagtgtttgtgaatccgccaagcagctattattggctgaaagacggcacaacatggaccatgctcggctatagtgacaaagcgggcgtacttgcggcggccaaaagggcaaaagcgttaggaatgaaggtaatggttgacttccattacagtgatgtgttcgctgatccaggccaccagatcaagccgaacaaatggaacggttattcaaacagccagctgcaggcagccgtgtataaccatacgtacgatgtcatgaaagaacttaaaaatcacggcatctcccctgattgggtgcaagtagggaatgaaatgaattcaggaattttactgcccgacggcagcacgaacgatttcagcaaattgaccggcttactgaacaaaggctatgacgccgtgaaatccgtcagcccggccaccaaggtcatcagccatttggcacacggcacggacaacagcctattcagatggtggtttgatcaattcattaaaaacggaggaaaaaccgacatcatcggcgtttcgttctatccctattgggaaggcaagccgtactgggagctcaccagccatttatcatctaatttgaatgacatcgcctcacgctacaacaaggaagtcatggtggttgaactgggcggagatgaaaataatccgaaagattcctactggaccataaaagacaccataaaactggtgaaagcggttccgaacggcaaaggaatcggcgtattttactgggaacccgaagctcactccagcgttctgtcagacgcgtacccattaggcgcaaccgccaaagtgtctaaaaacgtcttgaaatacacaaccgcaatcgacgcttttcatgatgccgcaacaggaaaatgattgatgcgaatctcaagcaggctcattgtgcagcctgcttttttataaggctgtagtgttggcctgttatgaaacagagcaagtaacgaatacggaaagaaaaatacccgaaaacccacgtttcggttaaaaagccgctttttaaatagaatacttcttctgttccccctccttcttatttctgcgcactatctctcagttcctaaataataactttacgattgttgaaaaagaaacaaacattttataatattgtgtaagcaccaccgagcaggaggacgggacatggacaaaaaagaacagctcctcacggatttcagggacttttttaacaagatggtgtggctgaataggctgaagatggaagaaagccttaaggggcataaaccttctgaagtgcattgcatcgaattcatcgaaaaaattgaagacgccaatgtgactaaacttgcggagtccctttatatgacaagaggcgccataagtaaattaacgaagaagcttatcaataaaggccttattgaaagctatcagaagccgcttaacaagaaagaaatctatttcaggcttactgagcaaggaaaagtcatttataaaattcacgaggaattgcacaaagagtttcaagaacgggacaaaatcgtgtttgaacaagtaactgatgaacaatttgacacgatgctgaacttcgtggaaacatacagcaggcatttggattcagaaataaagaaacttggtgcagacatgaaatcggaataaatatgaataaaaccataggcagcccttctccatgaaaacgggctgcctttttatatccctcttattgttgacaaagaaacaaaatcactctattattttgttgacaaggaaacaaagacagcaattttgagaggagagtaatatgtcaacacataaaagaaaggaacttcgggtgccaaaagaagttctcacagccgcctgggctattgcactgggagcaatcgctccaatgcttgactctacgatggtaaacatcgccatcgacaaactgaccaaagacttcaacacgacattggataccattcagtggtccgttacaggctatgtcttagcacttgcgattgcagtacccgtatccggctggcttatgaataaatataacggtaagaaaatcttcatcggctcagtcatcgcctttggtgtcatttctgtttttgcggggatgagccgtgacgtttccagcttcatcttcttccgtttgcttcaaggattcagcgccggtattatgactccgcttatgtcaacactcttggttaaaacggcaggtccggaaaacctgggaaaagtgatggcaatcgtcagtacccctatgatcttcggcccgatcttaggacctgtcatcggaggcttcatcgtccaaggcgcttcatggcattggattttttacatcaacgtgttcatcgttttgattgctgcaccgcttatgatgaaaaccattccagaatttgaaccattcaacaaagatcgtaaactcgatattttcgggattatcaatttgtcattaatgagcgcggcattgatgtacggtattacaaaagcggcggatcatgcatcatttaacaatagcgacaccattttatgggtgggcatcggtcttgtttcagcagtcatttatcttgtatataatctgatccagaaaaaccaaaccgtgctgcctatgaatttgtttgcaaacaagagcttcttatcatcttcgatcgggttgttcttagcgaatgttgccatcatggggccgatgttaatacttccgctgttttttcaaaacattcgtcatttcacggcagccggagcagcactcgctttaatccctcaaggagtcggaatgctcgtgactcgtccgctgatcggaaaaatgattgataagatcggtgcgaaatacgtggttacggtcagtcttgttctttcgctgatcggatctatcccgcttatttttatcaccgataacacaagtatgatttggatttccgtcgtattatttatccgcggcaccagttttggaggaattatgctcccattgatgagtgacgcttatacaggtcttgacagcaaacagcttccggaagcgggtgtcggtattcatatgattgaaaacctcggttccagctttgggtcagctgtgatcgcaaccgttaccgcaactgtcatacaaggattgcagccgacgatttcgaacagtttaaaaggctaccatgccggattcttagtatccgtcatcatccttgcggccatcttcattccaagtctgttccttacccataaaaagactgccatataaagaactttttaaagtaaaaaacccttgcacagcaagggttttagtgaataaaactgatgatggttgccggcagagtcagccaacaacagacaaagccttttactcattcacattgcttttcattaaccattctacttccgttaattcttgtttttgaacgtcttttgtatgttttttcgtaaaatggactttaacagcttcttcgttttcccaaatctcccaaagcatgagtttgcgttctgatggttcgagcggataagcatggaactgaatacagccttcttctttgttcgtttcttcctcaagttttttgaactctttcattatttcattaaggtctttatcactgatgatttttaagcatgccgttatgtaatgcatcgaaattccccctcttcccatctttttatggctttacattataacatcgaaaccggcataccgcattctcaacatataaaaaaccgtccataaaaaatgttggcaatgtttatttaagagcatttagagcgacttttgcagcctcagcgataagagcattattataattggcatcttccgtaaaccggtttgacaggattgccaaaacaattggggctctgtcaggctgccaaacgatcgcaatgtcgtttcgtgtgccgtagcttccggctccggatttatcgccgacttcccatcctgcaggagcgcctgcccgaatcagttcgtcgccggtagcgttgccccgcatccaatctgttaaaatcgtgcgcttgtcagccgtgagagtgttactcaaagcgaaagtcttaaggtcagttgccagtgcttttgcggtgcttgtgtcacgacgatccccgggaatcgcagagtttagatccgtctcgaatcgatcagctttcgttacatgatccccgatctgtttcaatgatttttcaaaacctttgggaccgccaagctgctgcagcaataggttcccggcggtattatcgctgtaacggacagcggcttctgagatttctttcaggctcatgcctgtatccaggtgtttttctgtgattggagaatatgtaactaaatcgtctttgctgtagcggatgatggcattaagtttttcatttgagcttttcttcagaacagcagctgcagccagaactttataggttgatgcgtaagcaaaccgttcattcggccgataggcgattgtcttgtttgaacctgtatcaatcgcataaacgccgagcctggcatcaaattttttctcaagctgaacaaatttttgattcgttatacaacttgtcatttttgtgttttctatagacttcgcttcagcatgcgctgagccgaataaaggattgaaaccggtaaagcttaaacataaaagtccaatgcatagtccaacttgtattcccgctttatttttcacatccagacctcctcattaaaatgattttgtatacatcttctaattaacattacaaacaggatgaaagtcaatatatttcctttgaatgattaaatcctgtattctgattcatccccttatttgcgcttaaatgcgccgcccttgccgtctgaatgtttgcatttccgcttcgtgttcatcatctatttgttatccctccgtgcaaataaaaacggacaccagtcagagcacagtgatgctgtgcaatgatcagtgtccgcaggctttccgtcttggacctatatatgtttctcttgcagactataaaaatcataaggtaagttaacaaacgcattaccttaatcctgccagtcaaaaaattatatcattttatatatttcaataagattattatctggatctctgaaatgagcaactcgtgcacgccattcctgacgatcatgtggttcattgacgcatttaatcccttgcttgtgcagatagtcatacgttttatcaacatcttctaccttaaactgaagcaaaaatcttgattgcgcatctccgtctaaagattttctttcttctccaactatttcagccatattttctcgagataaaagctctattttcgtttctccattatcgaagagtgcatattccatttccttctctaaccaactgattggaagtcctaatgaatctttataaaactcgacgcttttcttaaagtcattaaccaatagtctaatttgcagcaatttcatattgaacgcctcctatcattttactggccattcatttaatcatacaatagggacctgacagcattatgtcaagtttccataaatttttttccatactgcacctaaatttcggatgaaagccttcggagattcatgaaactgcgtttgatcaattcacattcttggtttgaattttccttcacttcaccgtggaggctccggccgtgtaagtcgcgcatccgtaaacatccggccgccgctcctgtaagtaaaacaactgataaatgattgactgaatcgtttttcaccgtcattgcttcccctgttttttgtattctgcgatttccttaggggtagccttccggactccgtctgcgtctgtcctgtttgccacttgagcgccttccatgttttttatctcgctgactactcccaaatgctctaaatacacatgatcaccaatcttgaaacgattcagtttagcccgctcctcggtcatgctcctgtattcagtcgcggctttcatttttaattcagccagacacatttgacaaagggttactgttacagaattgccgttaaaatcagtaaacgaaaccgatctgacagattccttttccgggtgcatcgtgcatgttttcttcataggcgatggccgtgtaaatttaatcattccgcttcctcctcaaaaaagtcgcttcgtccctctgacgtaacagcggatgaatgggaagttccatacacccgcatccgaaccgtcacaatacatggagattgcctttccttcgccggctgacggatattcatacatcctgcatagctgtaaagcctatatttctttatattcccaatgctcgccgcatttccctgttaggatgaagtttctaaagctgttgaccagttgccgcatgttggctccatgcgaaaagccatgtggaccgccgtatcccaattcatacgggtaattttcagccctctcatatgtgtgtatgctttttaaaggaggtgcatcacatgatgttctaacaacccattcaacctaaagctaactcttccccaattcccgatcataaaataagtaaatttacccagaacaaattaatcattttgcactttcaaaatacttatttgtctttcccttcattcctccatggtaatatcttgttgaacctttttaaaagaaaggatatggtcatgaaagttttcgaagcaaccaccctcctcgccgctgccaaacagcgtgcgagtgaatacaaaaaactgcgcggccagatggtcaatctaaaaaaagcgtttcaaggcatggctgatcttggtgacggcgatttctcaggccggggcgctgacaacatcaaagcttttttcaaagaccacgccggcgtcacagacagctggcttgatctgatcgacatgaaaatcgcatttctcacaagccttcccggtaaggtcgaagatgccggactttccaattcgcatgtagaggaatcatttctagagcacgagctcacccatgccctcagtaaatcaaaggcgattatggaagagcagaaaaaggacatgcgctccatcctcggagagatcgaagacattatctcgctcgatctgttttcaaccgaaagcacagatcaggagctttcttcagctgacaaaaaaagaagcgaaacgatacataaactcggcaagctcgatcacgatctaatgaaagaatacgcagaaaccgaagcgaacgaacagttcatccaagctgacttccagcagcttcaaaacgccacgggcaaaggtaaaagcgccacgccgcttcactacaacgccaaagcgtatcgtgaaagcgacatccataagaaaaaaggcgatatcgcaagactttcagatgcttatttgacgattaaaaaggaagaagcgaaagagcgtgaaatcaaggatctgaagaaaaagctggccgatggtgtcaccgatccggatgagtatttggaaatcgcgaaaaagatcggctatgaaaaccttgaacccgctcaggtgcaatatgtgatgcagcttgaacaagcaaaacagctcgaagaagtcggagaaacggcttgggatatcgtcaaaggaataggcgtcggcctttatgatgtcgggaaagacaccataacaggcgtcaaagatctggctgtcggcgcatgggatttttaccttctctctgatgaacaaaaagtcgctaaaaccatatcagctgtattgaacacaccctcctacgcaaaaatcatatggacaaacctggcggattcgtggaatgataaaatggttaacggggatgcgtattcaagatcacattacatcacctacgccatcgggagcattgtcgggctcaaaggttccggctcagctgtaaaagtatcaagcaagctcgccaaaacaggtgccgccaaagtggataacgtcttggaagccggtgaaaaagcggctgcaaaacatgtaaaaacagggattgaaaaaggaaaagactatatcaattccgtttcgaaaaataagtacgaacccgcacttgccggaatagcacaggatattgaaaatactcataatgtgaagaatacgcctttgttgaaaagtattattgaagatcagaaagagagtgtgctcagaaaatctgtgtcttctgacaatagcggcatacatagtgttaaacaaggagacagcagtcctctcgcaccaggcggtggcttagctgctcatgaagcaaaaggcggacaccttatagaaagacatgttggtaagactgatgaagagttattacagaggctacagataaacaagaagatacgggcctcttctagtttcactgataggccaactgcagaaagagtcgctaatgaaacattaactaaacataaaaaggaaattgaagagtggttaaaaagtgatgttaatgatccattaccgttaccttatagaggaaccgaagttataggtagaggagttcgtaaaggttcaaatgaagttaaagatatgactaatgctagaatagtattaaagaaaaatgaagatggtagctttatactaacaggctacccaacgaggtgatatataatgattgaaattaaagtttctgatcctgtatttagatttctcggtggacatttccaccaagatatagagtctccggaagatgcacttgatgaatatttaaatgaagcatctcaaaaactaaaagaaagagatttaatagcactaactgagtttgtaaatagtgatcattcagaagaagacaagaatgaatttatagaggaagcagcggatggtatatactttcctgaagatgatataactccattagaatggcttaagcaagtcactgaacaaattaaaaaacatcttaaaacaacatagttagagaaaaagagccctcttataagggactgaccccataagatgagacaaataaaaacaccttcaagtttgaatacggatgattgttatccgaaattagacttggaggtgttttttctatggggacaagagtgagttatccggttgaagcgaaacagaaggctgtagaaatgagattggcaggcgtacctatgaaagagatcatgcaggagttgaatattaagaataagacacaggttcagacatgggttagatggtataaggctggtgatacacatcgattcgaacagcctgttggaaagcaatacacttacggaaaaggtccggagtattcttccgatttagagaaactgcaggcagagattcgttacctgagacaacagaatgaagttttaaaaaagtacaacgaattggaaaggaagttgatagcgaaacgtcagtcgaacttgtagaaatattgcacagcacaatgaccgtacaggatatctgtattcatttaggtatctctcgagcgtcttattatcgttggaagaagaatctgatgaaggatcatcccaagcgccatttggaaaaacaaatcggcacgttgtgccgagagcacaagtatcgatatggatatcgaaaaatcacagccatactaaaaaagagaatgtgtattaaccataaaacggttcaacgtattatgcagaaaaatcaatggcagtgtcgggttaaggtgaaaaagcgcaagaaggatgggcagccatatgccgtggtcgataatatattggatcggaactttcagtctgatcgtcctcttgaaaaactagtaacggacatcacatatttgccttatggacagaaacaattgtacctttccagtatattagatttatacaatggagaagtgattgcttttactattggggataagcaggacacagcctttgtcttagacacacttgatcagctaccaatgctgcctgagaactgcgtgttacatagtgaccaaggttctgtgtatacatcttacgagtatcaaaaagctgttaaaacaaaaggcattaccatgagcatgtcccgcaaagggacgcccgctgataatgcctccatcgaatcgtttcattcctcgctaaagtctgaaacgttctatcttaacagcattgatcgaactacgactgccatcgtagaacgcactgtcatagaatacattcattattataacaatattcgtattcaaaccaaactaaacaaccaatcaccgataaactatcggcaattggctgtttaaaaggtgttttgacccctgtctcaaaaacggggggcagtcccataagaagggcttcttttattaattcaatttcgctttcgtttttggtccgtaaatgccgtctggcttcaaaccatacatgagctgaatcgtactgaaacgttcagccgcatttactgatgtaagtgtatttgaataaattgcagaaaaaccctcctcgtcttgagaagggctctgacttatacttctttttctctaaatcagtccgaagcaaaaaactgatgccgctcaacttttcaatctgcccctatgcttttcttttgctttttgttttctgattaaatatttttgttcctttattttttctctttattttctattcagttgttttttcttttcttgtttcaagctcctgttttatcgctttttatgccttagttgatatcccgatatttttcatctctttagaagcttgtcgttgcaatctttttgggtttaatttcttagattttgctttaacacaaacctcttcttgtcagtgtgggagagagtctgtaaaaaaggaaagggtctccgcttattttaacaacacttcaagttttactttggttcaagcgcataaattccatcagcttttaatccattcatcaattgaaatcgaattactgcattcgctgtcttcgctccatatgcaccatcaatcccgaagttctttcgctataatgaagggcgacagcgccgttcgaatctgttttacgctctcccctcggattttaatgggttttcaactttaaaaaaccggaagacaagaggaaggatgctttcttgccttcagatgaagagccccctgaatcacttctttatcatcgacggcaaaatgatagcttgtcgattcgctgttacccgacatataactgatttcattggcggccgcatgcgtcatttcctgtattgtgaatgattttcggagtgccgctgtatttgccataaaaaactaaatattccgtttttcaaatacaaaaaaacagctggattaaccagctgctgatcgttatcactttagccgttcagtgatacgaaatttctgtatttctctgaaatgaacaggtttcggcaaagaccgccgccttaaaggcgatgtttatctcccttgcagtatacagcgaatgtacttcaaaatcagcccaaaaagcagttccgtccccaattcgcccctcgatgaatgatgacaaaatcaataaataagcatcgtcggactaaaaggttccggctcagctgtaaaagtatcaagcaagctcgccaaaacaggtgccgccaaagtggataacgtcttggaagccggtgaaaaagcggctgcaaaacatgtaaaaacagggattgaaaaaggaaaagactatatcaattccgtttcgaaaaataagtacgaacccgcacttgccggaatagcacaggatattgaaaatactcataatgtgaaaaacactcctttgttgaaaagtattattgaagatcggaaagagagtgtgctcagaaaatctgtgtcttctgacaatagcggcatacatagtgttaaacaaggagacagcagtcctctcgcaccaggcggtggcttagctgctcatgaagcaaaaggcgggcatcttatagaaagacatgttgggaaaacagataaagaattaatagaaagactgaaaactgatcctaacccacatattacagcttcatctacttttaaagatagggctaccgctgaaagaattgctaattcagttttaaacgatccaaaaaatataaagaaaatcgaaaattggattgatgatcctaaaaaacctaaattaatgttaagatacaagggcgatggagaaataatcggcagaagtgtatcaagaaattcagatctagtagaaaacgttacaaacgcaaaaattatactcaaaaaagataataacggtaactttatccttacaggatatccaaccaaatagaaagagaggaagtatcatggatgaaaggtatgatttcttagatgaattagaaaattttttaggtgcaacatttcatcaagatatccaatcccctgaacacgccttagacgaatttattgaggaaattagtaaagaaggtttgctatttacagtaaagtattgcgaagagtttctaaatagcgatctaactaaacaagaaaaggaagacattataaagtgtaatgcagaaatatatttcccgacaattggcttaccgcctatagaatggttgaaaagtgtaatagagcaactaaaagaggctatttaaaagaaacactgaaaggcccccattttatgagagggcctttttatattgataccgaatttttcggctttcttatccgatagaaatgcaataccgacagtgcggtttggatctacttgacggcatcactagctgaacttttcaacaattttgcccctaaaagagatacgaacaataaatttcgagccgaaaaatcaagttcgccaacaacttgcgaatttgataaaccggctttattaagggaaagtaaaaaacccttgctacgcaagggttctggctatgattccgactgggctcgaaccagcgacctctaccctgtcaaggtagtgattatcttctgatacgaacagatgttttattttaaaaccttattttataaggttttctgaccagtctttctgataaaaaatcttctgttttggctaaaaatgaacaagttggtccccaattcgtccccaaatcagatttattgacaacagaactaatgttcgtatatcatccttgcaggagttgaatcgcaatgaccgattttgaacggaaagtatatcggattatttttaacatgacccgcttcgggaaaaatccctccatggaacaattgaaaaggaaaaccgggaaagatgagcagacgatccgtgctgctgtgaagaatttgatgagacagcgcattttgaagtgggataaactaaagaaaaagtggatgttttgacacattacacattacaataaagttaaacaaaggatttaataggagatatatttgagtctctttataaaataggtgcctattcgactgctaaataaaagcataaaaaaagcttacataaaagtaagcttttttaagagaaaaaattttgccatttttcaaaagccgaaattaaattcactgagttagaagcagtcttaattattgaatctgctgaatctataaaacttttcaagactgctttctttggtttttcagcagttatctcagaattagctgcgtccacaagctcatttaattcttcttgcttttcaggattcaattctgaattttttatctcagcaagaagtaatttagttacttcctcgaattcagtatctccctgattgttgttattcaccactgtgttattagaatgcgaaccaaaactaattgcagttccatttgggttatgaactgtattatgaattgttttatccacgtagatgtaaacccctttcattttctcttcaaattgtccgttagctatcagttcttccatagttttttctttatctgttagactaactggagcctcccgctccagttttcgttcaagctgggcggtttcttttttttttgacattgagatataaaataatcagtgaattcaaagactaacaagaagttctctggctctggaacaaagtctatttcaccacaaatacagtcaaaataatcctcaatgttctcttccaaatcaaaagatcgaaccttatgattatttggacacaaaagcatttttttaggtattaattcaaaatcctttttactcattaaatatcttagtacaagatcataagaatcgttatttactccgatagcgaatagaacattttcaacagtgaaatcttctattggaggatcatttgcagcccactttgataatacactattaatatcttcaaaatatactgtgctcataattccccctccaatagttttttactaattaatcgatatgtctttttctatagtttccgcagtagacgccgcctcaattatagaagccatttttttatcttccatatcaaccttaactaaaacatctaaaacatgatcaacaacagtctcaggtacttccttggcaaacttaaaatagccctttccataattaacttcaaaagtggtttctatttctacggaagtccttggatcagtatatttgaaaatacacttctcgtccattttatgatctgttggataaccaagctcatttattgcagtagtaattatgttaaaggttttatcactatttaaatcaacgcctcttttaccgttaaattgaatacttcctacactagtaggaagtgcaatgtgactggaagaaacacctgccgaaagatgatcacacattctttttgcgttttcctttgtcaatttcggaacggtaaagtgattacagtcttttgaataacctataaattctaacacttgttttctatatttaacaatatctttaaaagcacatctcatttgcaatagaggcttatcagcaaatattacaacaatagagataaaatgagcataagagactttcatagaaccgtatcctttttttcgagttgagcttttttcttctacaaattttaagtagacggcacttccttcatgtttaattgcacacaattgtaattttggtctaaggtccggctcccactccgtatcaatttgatttgttctaagtcctcttttcccaactaagaatttcaacagtttttctggagtatttgaagtctcaggaaaggggtcttcaagttcacacaacgtcaaatgcttacttgaaaacttaaattgctcatctaaatatctcaaatcatcccggtagcctttttcagaaagctcgtcaataatttcaacagcgtcacggttaaaaaacttaactttttttgtttttgcaaattgatttaaaattgtgctcttttcaactatatttaaatatttctgcatatagacctgcccttcactatatccaataataaagagcactaaactatacttgaacagtaaacaatggtagtatcaagttgtctaaagttaagtgctcgccccatcttaatgatggggttttcttattcaatattaacaaaaaatttacagcagttccatcttttcgttcaaatctctctttacttatagtaaagaaaagtatgacaaaaacttcaatcatcctacggccggtacttcttccgggcgacttccaattcttttttcagtgcttgtacatgtccaagcaaaaacaatgcaactgtcccaacttttaatcggcttgagcttcccggctgtcacaagggtgcttaaacgctgccgggtgactccaagcagctccctcgcttccgctacagtcttggataaacttaattttttcgcttcctttcatgtcgtttttctgaccaaatcataataagacctttgaaaattgtgaggatcacagccagatataaaattacactcgctatcattcccgaaagcgataagtttttagaatcaatagctacaaggccaaataacattattagaagcatggccatttctgatgtactgtacttgctgagataatctttcattcgaaagtggatgagttacagtataccgcaatacgtttttgcggcataccgcaatcccttttaatgtatactgagtgtatattcgaggaaacagggggtttccccccttgaaaaccttgaaacctgcagttgcgcttctagctttgccggcggaagcgctttttctttttctctcctcgctgcttcttttcattttggaagatgtcataaagctgtttgcatattgtgacaatccccgcaatggaaagtacccagtttctaaactcatccacttaaccacctcctaatacaaaaattataccatttttatccgagacaccaatatatttcataaaaaaaccactctaaagagacggatgctccgctagtcatttttacccaaccacttaaaatctgctttctatcaactttattcaagagcaacacaaggaataaagacgcagaccaaatgattcattttctccttttgaatcgtacagcgacctttttcttcattcttccatggtaaaatcttgttgaagctttttaaaagaaaggatatggtcatgaaagtttttgaagcaaacagcttgttgaccgctgccaaacagcgtgcgagtgaatacaaagaactgcgcggccagatggttaatctgaaaaaagcgtttcaaggcatggctgatcttggtgagggcgatttctcaggccggggcgccgacaatatcaaagccttttttcaggaccacgccggcgtcacagatagctggcttgatctgatcgatatgaaaatcgcatttctcacaagccttcccggcaaggtcgaagacgccggactttccggttcacatgtggaggaatcatttctggagcatgagctcacccacgccctcagtaaatcaaaggcgattatggaagcgcagaaaaaggacatgcgctccatcctcggtgagatcgaagacatcatctcgcttgatctgttttcaaccgaaaacacggatcagaagctctcttcagctgacaaaaaaagaagcgaaacgatacataagctcggcaagcttgatcacgatctaacgaaagaatacgcagaaaccgaagcgaacgaacagttcatccaagccgactttgagcagctccaaaacgccacaggtaaaggaaaaaacgccacgccgcttcactacaatgccaaggcgtaccgagaaagcgacatccataagaaaaaaggcgatatcgcaagacattcggatgcttatttgacggttaaaaaggaagaagcgaaagagcgtgaaatcaaggatctgaagaaaaagctggctgatggtgtaaccgacccggatgaatacttagaaatcgccaaaaaggttggctatgagaatctcacccctgaacagcttgaatttgtttcatttctggaacagcgtaaagctttcatggataacggaaaagaagcattgcaaatcataggtgatggcgccaaaggtctgcttgttggtgtatacgatcttgccaaggataccggtgaaggagcacttcaactcggatggaatatcggttggacaattgacaacttaaacaaagatcctcaaaaagttctggatactgttctggaatacgattatctaggtgtctatcaaagtatggttgacacattgaaggatgattgggataaaaagatgattcacggggatgcatatacacggatgcactatgttacttacttgggcggaagtcttctgttattgaaaggcggaaagtcctctgtctcaacaggctcaaaagatcttgctaaagttgggaaggcggctagcgaaaagattaaaaatggcaatccatctgtcaagccttatgccaatagatataccccggcattagaagggattttacaagacgccgggaatactattaatgttaaaaatacgccgcttttaaagagattagttcaatcaaaggatgatttgtttactaaagccgcaccttatacttacagagatgaatatggaaacctcaaaacagttaacttaaaaatgggccatctaaaaaaccaaaaacaccctaaaactggagttccatataataaagacggtttcccaattttcaaagcaaaatttgatacaaagattgattccaaactttataaggaaagcgattatttacaatttaaagatgcaaccttaaaattaaaagaagaaattgaaagagatcctttacttagaaatcaattcaatgaccttcaaatcgaaatgataaaagctggtgaaacaccagacggatatacttggcatcatcaccaagattcagggagaatgcaattagttgaccaaaaggtgcatcggcaaacaggccatacaggaggccggcacctttggggtggaggaagtaagaacagataggagttggtcaatatgacagagtggagattcgccgaagaacctatcggggaaacaactgttaaaaaaatcgaaaaggctttagatattaagtttccaaacgactacatttcaactatattaaacaacaatggagcacgcccaagtaaaaagatttttgactatgaaaatacaaaaggcgcggtttttaatcgattacatggtctaactgaggatagttcaagttttattttagaggttttagaagattatcaggatggaagaatgctttcagggatagtccctttcgcctgtgatcctttcggtaatgaaatctgtttcgattatcgtcagaataaagaaaatccctctgtggttttctgggatcatgaaattgcttatgaagaccctgatggagctttgagtcatatatctgattcatttaccgatttggttaataaactatacgatgaataaaaagataagtcccttctcataacgagaagggattctcttattttagtagagcttcaagcttcgcttttgttttcggcccgtaaatgccatcagcagtcaggccgtacatcacaaaaaaccctcctcgtcacgagaagggaatcattcatcatacaaacgatacttcttaacgctctgcctctgatttttttcagagcttatacattcaccaagaggaaaagcaggcatttacctgcttttagaacaacaatagattaatagcataataaacaccatcagcaattattttggccgatcctccgccaatcttacccttcaaagccttaaatagcttgtccgaaatcatatgtgcagtaacatcgggaagttcagctatttcatctatcttatctgctatgtagcctgaattctttttaaatgcttttgctgctttagcgtcggcatgttttaatatttggccaaccgctgctccgccatgtctaattcctaaggagactgtatttgcagctaatttgactagatagcctttaatgccggtagtgtggaacactggctcctcactctgttcctcagccaaattgttcacagtgttagtttgaacattaacactctgtgttgttcctttagtctcagtttgactattaggagttgcggcacttgcaacgcttggtaatagtgttgatactaaaagtaagcctgtgagagacagaataattacgcttgacataatccttttcattttaccacctccttccaatatagtattatatactaaaatttataatttttgtttaaaattagttaaaaaaggagacttatcatgagaaaaatttacaatcatatgaatgttgaccaaaaaaagactgctattaaattgtttaaagaggatttagaagaactgaagaaggagcagaaacaggaaggtgaaaagggttaccctcgggttgtaagagatgcaattgaggaaactatacaacggtacatacaagatatagaatacctaacaaatgacttaaaacaaaatgagcaggcctaatgcctgctcattttcatttcagaagcgcttcgatctttgtttttgtcttcggcccatagatgccatcagcagacagaccatacatggactggaaccgtttgaccgcatttgctgtcttcgcgccgtatgcgccgtctattccgaaattctttgcgttcttatccgggtagtaatgaagagccgccagcgccgtttgaatctgttttacggcctcccctcgggtcaatgggcttgtgactttaaaagtacccgctggcaggcggaaggatgatttctttccgttggatgaagagccggccgaatccctcagctttattacctggccgactctgattagattcggattcttaatgccgttcaagctttgcagggttttcatgcttactcctgttttctctgcaattacagaaaggacatcgcctttcttgacggtgtacgtcgccccgctggtctttgaatctgttttttgtggtttggatgcttttttacctccaaggcgttcaagttctgcagcaatggccgctttcacttcatcccagcgccccgcatctaaaatacggtgcgggcagtatttcccattccagtcctgatgctttctgattttgtcaacgccccatccgcgctcttgaagtaactgagcgacaaacttgatagccagcgcttccgctgcttggtatcgcgctccgcctgacttgctgtagcagatttcaacaccgatagacttacggttcccggttccgtttgtaccgtcgccagaatgccaagcgttctggtccagcggaatcccctgaattacttctttatcatctacggcaaaatgatagcttgtcgattcgctgtttcccgtcatataactgatttcattggcggctgatgcgtcgtttgctgtgttatggatggtgatatactccggcgtcattggattcgggcatttcagggcgtaattttcacttggaactaatctttttttgactgcaattgtcatgaaaaatctctcctattctgtttttggattcaaaaaaagcagcctgattaaccagctgcttgatcgtctttttctgttttctgatcgttgtcgctttcaattacatggagccggtcagtgatgacggccgggattttaacgccgatctgtgccaagttttctgtgatggacaggccctcatttgcgatataaaaaagaacggttccaaatgtcagaacaccgttcaaatttgttatcgtatcaataatgtttgcgacgatgaccaccataaaactgagcatcttccggacatatccaaaccacgcgctacggctccggagctgcttcattttccatgcttttataatgccagtgatgacatccaagatgctgaggatcaaaagcaagtcaaggtatttcacctccccgaaaagataggttcttgcgatctgtaagctctcaaaattcatccacacgtgtattccctccattttgtcttcacctcctccgaggcaaaataaaaacaccctctcaggtgttaacagatgaaaattctatttatttttcgtcttttctttctcgagttctttttttagaattgttatttcttcatttgcttgctttaatttattttccgtatatgaatgaagagctttagaatcagctaacttattatagagatcaccaatatctccacccaaagcattacattttagcgccaaaagctcacactgttcttttaatttttccgagctcaattcactgttcatcttctatagaaactcccctctgtttggctgttatttcatcatattccgcttgggtaatccatcctactgatactgccaaattcatttgcttggtcgtaacagtccctttgccccaacacctatcaaaatacttataagagttgcttttattcatttttgtaatactccctttaaagcaagctcttcaaacagttgattgacaagtatttgtgttaactcaatatctgatttagtatcgtcttcacctgaagatccctttatgatatggggtgttaattctttcaaaactcatcagccctttcacctgagtgatattcattattagaagcagcaccttctgcaatttgtatttgaaaatatttaggcagctcttttaaatcctcatttgttgatacagggaagtcgtcactttttgtaaatgaaaccccgtacgtgttgccatctggttccacataaaattcgagcaatgtccagaaaagcctctcgggtttgacaccattaataccaacgtcttcattaccctcaatattcttgatcagataatactcaaaatcacttttattatcttctccttctaatatcattaatttatatagagaaagagtatcttcgctttccaatgaaaagtaaaccgcatccatttgagtaacagtttcgtttgcctgtccactatttaaaatcaatttgaagtttgatacagttaccgccccggcatcttcttcaatttttaaacctttcatttttatgtcatcagctctatagttgaccatacccaacatatgaagcgcctccctaccttggttcgtaaatatacagaatcattaacctaccgacactctgaccttctacattaaccgttccagtgccacgaactctaaaagagatagttgctgatttatctccatttaaggtcatgctgggcacaccgcatgtcacgcagtctgaataactcccgtaagcttgtactgtagcgaaaaaaatgttttcaacatctgttccaatacttagagttccatcaccataagcagtgctcccgctgcctttatttatattgaaattgtcccaataatgaaccctgaggatcgcattgctttgtaagtctccccttacatcagttacagcgttgctgagggtcaagccaagagcttgggaagatagtttcagttcattcccagcctccaaacgaacgttataaggcaaatacaccgaatcgccgtaatagcccatataatttccatcgccgggtaaggtatcgtctctgtcaattttgaacatttgctttgcagtggcatccccttgatattgccacacttcaaacccaaagcgttcattctcagaaccagccttatccggacccctcccggtaaatattgcaacatttccccatttcgtagtgctatcattcgagttttccacaacaattttaggcacatttgtatcgtttggtgttgctcctgaccaatttgcaaaataggtcgatcttaattctaatctcccgtcccactttccattagcattaggtgatccacctataattgtttttctatctacaaaatctgcatttaagaaaggggcgctgtcagttccacttatttgtttcgctaatgtcagataatccttcgaccccattaacccaattccccgttttgatgtattgccagacttccaaacaggcgtcaaagagcctattatatcgtagttaggtttaaggtcatcagtacctggatcgtaaaacaatagattatagttatacatttgtatcgtttttctgccgtttaattcagacgtaatagtgccgtctttcagctcgatcgtatccccggaatcattttcacttcgaacgatgacacctgagagaataccacctttgatcttgtcggctaccagactattaatttttgcattcgtgatagctccgttcgccacattcaatgtatcaatagcagcagtaccaatttttgcatttgtaattgataaatcctctatatgattcgtaccaatacgaactgtggccgctgaatactggttagtgaaatcactcggtgtacctttagtattcaaagctcgaatgcgataataccaaacctgatcaacctcggcgtcatgaacgcaaccaccgtcttttcctcgccatatcaaagtagcgctagacggaacaaaaccattcatctgagacgcataaacttcgtatgcagcaatgtaagagtaaggttcgaaatcccatgaaagagatacttttgaaaaaagccctttcgcttgaacatttgtcggaacaggtggttttatgtctgggaaattttcatcggttattattatatttttaccaatattatttaaggagtcttcaattttatccagccgcgtgtctggttcataagcagaaagaaattgcccgatttccactacacaggtattatctggatcagttatgtcgtattccatcgaaataacccgttgcgatgtctcaattgggatagcgaagtttcgatcaattgctatcgtagtatctcccaattccacatgctcatgttcatatcccggaatgttttgaagcagttggaccgacaactcataattaacttctattttggatgctgtggttattaagtagtcatatgttgcttttaaaagctcttctggatctgttatattctcgttgttgtattcgccttctctgtgtattaaaacgtcatttttaagccggcccagctgttttaataaatccggatcaccaacccattcctggcctaaaggcttgtcgaccggatcaccttttgattttttccattctacttccgcaaagtcaataaaacgggaataaccgcccgtttcttctccgtcatcatcagtagatgcaatagatgccccgtatccccaaagggctgttactggatagctgatgacagttcgacgaatatttatcgtatccttgtcaatctcaaagcgcttgccgctgtccttaccacgtcgaggaagtatttttatgattcttctcgtgaccttattcccgtcaaattctatagtgtcctgaagctcgccgccccatatattgattacgtcagcaatacaatccagcgctgatttcttataaaaggtagttgaatttactccaagttcaacttttacctcagccacccaccttgaccgggaaaggacattatccagtacaaactgcgcagttttgttagtggggcggaaatctttgactctggtttcagcaagctccatcatggccgcttcacacgtaaccagagtgtttgtttccccttcttcgtctgtatcatccatttccttgatgacaaacagacgcaagttgccatccttatccctgaacactacttgattctcttgaaaaaggaatcttgcgtcaggatgggaagcatctgctacaaaagaaaaagaagaacccttgttaagctcttctttatattttgcctcccagaacatgcaggtttcttgtccgtggctggacagcactgtcaataattcatcatcgggtgaaagtatatacatgtcagccatggccggacctccttacaaatatgcctcattaaatttgatattgctcttatgactgaatttgattttcactggcgtctttggcggcagctgaaaccaatccgattgaatttgaagtgctggcatgatcaacttaccgctacatgtcacctttcttttcgctgaatcaattatgagagtgtcaccagcgatgaaatcgtacagcagcttgatcgttttcgataccgacccatcagcattaagaagagccacctcatatgaagtggctttctcttcaaaaacgcattcgattgttgggtctacagctgcatagcccggattagtaatagtttgaacacctgaatcaaattcaaaatccttcgccgggccgtatttttttggatcgggacagataaaagtcaatgttgcagtctgaaagcctccctgttcttcaccttctgaaatgctttcaaagacagcattatagactctgtcaggctcatcgtaaaaaattaacggcttaggctcttcagtgtgcagaataaaagtcaattcctcctgctttttcttcagctcttcttcactgctgaaggcgaaaaggacctcaatggttatgactcttacaggaattcttgtattgcgcaggaaaccgccggggcgattcccgatagtggctgtattcacttctcttcctgtcactccccggccgcccgtggacttcacataaaagaagggtgatatatcaatgccgtcaaacgtgattttccattggttaggcagcagttcctgataattaatcaattaaatctcaccctccttgcgttcgatcttctttgtgcgtctgtgactggcttttctactccttgaccgaccttcttgctgtccatctcaaccacaatcattctgtcaggcaattcaaggttccggatgtccgcgctcaattcttttctaacagtgccaagttcaccgctagaaatggaagtgtcatattcaaaattcatatcctcttgctgaatagtcatagcatcactgacggctcccatggctttctggacagtgccgataccgttctgaatcccgacagcgataccagcaggaaccatgataccgaccttgtcacgcattacccttgacggagaatggattcccaaaagttttttcatgccgttaggaatagcatttgccattgattttactttgctcgctaatgctcccgccatgccgctgataccttttattaacccttggatgatgttcttaccgatctgccacaagttaatgccgcggaaaaacttcatgacaccgttccatatgcttgtaattgttgatttcgccgatttcattacgctggaaatagcatttttcatactattgaataggcttttagctgtactcacgagccctttccagagccctgtcacaaaacctttgacagcgttccacacacttgtaaaaacactcttggtgccattcagcatgccgctaaaaaatgacttcaacccattccaaatgctcttggcagtagaagacacagctttccatactgtggtaacaacagtttttatcgcattccaaacggtgctgaagattttcttttgcgtatttagccaacttgtgaagaatgttttcaatccattccagatagtttttccaactgatacaacgcccttccagatcgaagtagcaattgttttgatgccgttccaaatgcttgtgaatgctgttttcattccattccagagtgatgaaaagaatgttttcaggccgttccaaatgcttttagctgccgatacaattccattccaaacagtagagaagaacgactttattccgttccatgttgatgttgctatcgtctttatacctgtccagacagtagacagccaactggaaatagcaccccatgccgcaattgtagccgattttaccgtgtcccaattcgcgatgatcaaggcaaccagaccgatgacagccgccgtaatccatccgataggccccattgcgatgacccaagatgccgccatgcgtgccgcctgtgctgccgcttgtgccgcaagcacgacgagttgccggccgaataaaaccatttgcttaccgcctgcaaccagcaaagatataaaattgctgatctgcgccgccgtccaagccgctgccatgcgagttgcctgcgctatggattgcgctgcgagcacggtcattttggcaatgaaaagacccatctgcttaatcccgtttgtcagcattgtgataaaagaggtgatcttcattgctgtccatgcggttgctgtacgggcagcacttgcgattgattgagccgccattacagtcatattcttgatccataaacccatttgaacaatgccgcgcttcagagcagaaacaaacgctgatattttcatggctgtccacgatgccgccattttcacagcattagctgttgcgcttgctgccatcgctgtatacttcgcaatgaattggcccatagcagctattgctgattttaattgggtaatcaatcccacagttctgatccctgaaaccgccgaaccaaagctccgcaaatattgagctgcagtcataaaatctttaagcccatttgtgagagcactaaccgctactatcgccggaacaatagctcttaaagcaccaattaatgaaataccggctgcgataaatttcccgattgccgggtttgcttccatcgccgcattagtaaatttcaaaaacccgtttacattctccaaaatcgtttgaccaagtggagccatgccaacaagcaagttgatgatagtcttcgcgatctgccccaatgtgctccacactgtgggcccgttggtcttgatataatcaatgaaagattgaaattcttttgttttcgtaacgctgccagcccactcattgaaccgcttggtcagatctacgagtgatgtcatcatgtcttgagacataggagcgaatccagtaaacagctttgtcaggccgcccgaaaagtttctgataatctgcagcagttttggaccattggtttttgtatactccacgaaagcctgaaatttctttgaagaacccaagttcgctgaccatttcacccatgattgggtcattccttcgatagattttgtcatgctctttccagtcggtccgaatgctacgatcagattgaaaactgtccgtaagacattcccggcagatcggccgaatgaagcaaacgccgccggagcttctttgttcagataagaaatgaatctctgcatgtccggagctttaaaagctttgtccatgcttttcgccagtcccacgccctcttttgccagtccatcaaacattggaatgagtgagttaagcgcgagtttaaacgtatttagagacataccgaatgttttcaagatcggcttttgaaccatcgtaccgatgtcccgccaattgtctttaaagtcttcgaggttctttaatgcctctctctcttcttttccaagagatttttgcagattattgatctgtttcatgattttagcgcgctcttttgcgcttgttgcattgtccagcttctcctgcagctttgaaaggtcttcggatgctttaaatacaccgcttattgaagtaacagcaagggcgccgaatgccgccgcgcctgttcccgctgttgcaaatgcactggttaaccccattactccgccggctgccaccccgagcatagggcccaatgacccgattactccggttatgctggcaagaaccggagtaattgcaggcaatgcggatgtgaaggcgccggcaagcgaatgacctatgacagttgaaacagagttagtgattttggcgagcctgttcattgatgtttcaaaccgatcaattcgggcttcgatgtgtatccaaacacgttttggcaaggaatgtgtctctgttctggctactgctaccgctctcgttaaattcgaagtatcaccgtttatgttggttgtgactctatttcgcaacgaagctaaagctgtccgtgcttctgacacagctctagtcagaggatctgaatcagcatctaaatcaactcgtgtgcgttcatgtcgatgtacaaaattatcaatttgctgctcggcctgccgcactctggcctgaaagcttgcgatctctgcgtcaatttctactgtctgatgatcattcatccggcgcatcatatcattcacatggtccatgctgcgagtaaatcttcgtgtctgcgcttcaactattgctgtcaatctttcgatcaattcctcaccccattccttgtccaaattttgcaaagtggttgcggattgtatcattaaaccgctgaacccctttagctcgcttgccgagctcgtttacatctgtcttgcgccatttgtcgttatccccagtgatgttccgctccaattgacgtctggccttattcgcatcaaacattttcttttctttggggcgcttctcattcatagcgtaacggtgaaacatggcgtttcttgccataagctccaattcatctatttctcgcaacttggcccctttgagcagaagcttgtactcgttaggagtccatgacatgattaaatccacatcataaaccccaagccaatgtgcggaattcgtaattatttggtcatagtcgatcccgttctctctttgtacgcctctttcatcatcttcaggacttccttgccgttctcttcgtcctccagccgtttcgcttccatttccggtgtttcgttcggagccggtttcttccctttgttcatcttctccatcatcttccatcgctgacggatcacgcctttgaaaaaacccgctgagtccagtgttgtgaatgcttcattgatcattttgtcaattgcctcgcctgtctcgtcttcatcaatgattttcatgattgcttcttcaatagcctcagttgaaggcttttctttcttcaagtaagcaagtgcgcaatcccaaaaagcagaaagataggaagcctcttcgttgagcaggctcatgtaaatattcattgtgccgcctttgcccttttcgtccgcagtggaatatttttcgtttgccaatctgtcaaaagcaaagtcgcagcgtgatttgtattctttatctccgatagttaagtaagccatttataaaacctccgattatttttgtatgttaaaaaagagcccgggaagcccggcccctatgattccttttctgttcgtatcgtaaaattggccgaacgttccgattccccgaccgagttcactgccgacacgttaaaaatgtaggcggtgtccggctttaggttaggattcgacgtgtacgaattctttgagacagtcgctatttttgcataaaacctgtaaatattgtaagatgtcgcccctttcaccgcatcccatgaaaaactcacctgatttgaagtggcgcttttcgcagttatattgcggggaacgttagggcgtaaccgcttgtgtttgcgtaacaatctcagtcattgaggactcacccgcatcgttcacagcagagacgttgaccgtgagtttcgtatcggccgcaattcctgtcaaggtgtgggatgtgccaatgacagttgcgtccagctgcttgctcgctcccctgtataccttatatgaagttgccccatctaccgcatcccatttcacggtcacgctgtcagctgtagccgtgaacgatagattttggggcgcattagggcgtagttgtttttttggcattctcgccaaactgcatgaactctttggcaccggcagaagatctgatctcgtcaattaattcttgaggcagaggatcaagctcacctttacgggtcttaccgagaacaggcaatgttgttgaaacctcaataaacccatcttgcggtgcacttttttctaagttctcgatgattgcatgtccatattcagaatcatgcttatcgtttttgtttttattcaggtttactttccatacctgaactgtctcttcgttgtcataagcatcttcaatcgccgtttgacccggatcagagacagcagcataatatgtcagttcgatgctctcagatttagggccgtacccaacaattcggccagactttgttgattcatcttttgtatcttgttctttcgtatgactgccttctgtttggaatgcgataaacagaccttcagttgaagtagcattcatcggttgaacaaagtaaacctcatcaataccattcaataaatctgccattttgttcatcctctcaattgtttattgtgaagcgcattctgagaatgccgtgacgcgtgtatccgtcaatatcagtgatcacctgcatgctgcgcatctcagaacggcataaagaaaagccctctattgttaggggcctgcttgttaacgcttgaagcatgaggctcaaaatctccatcgcttctttttttccgttgtaacctgaccagcagtgcagaacgacattgatttcttcaccgctggatgtcttggttttaaatggggaaacatcatcatcccccattgttacataaggcttttccagatctttcgggactgcatcaaagacgcctgtgacgcgcccgttcagcttttcgtctgttgataacctcttaaataaagcagcctgcaacgtccacagggcagatcgcatgatgacagctcctttctatcacatttgactggcaaaataccgcatgccttcgtccatcgctggattccagaacggctgtgcccgcattccccgcgtgaccacccatctattaatcttggtgtcataataaacccacggcgtttgccggccgccgccttcctctgcgtaaatccctgttccgtattccacatatacggcataatcggcaccaacagaaataacggcccgtaagccgccctcttggtagtcgatttcaattgaatttttcaggttccccccgtctattgcggcggtcggagcattcagaacagcgtggctgtaaatcagctcggccgtgtctgtgaccagttgcttaatatcatctatgacccggcttctgaactcgcttgtggctctttgcatctgcctgacccatctaccactgacctcagccattgcccttcagcacccccgtaacctgacatttcaaattcataatctcatgcatgccaccctggtcgatcggatctgatttgagagtcagcaccttgttttcgtagatgatccgcattgtcttctcaatatcattgcgatacgggaaatacacattgcaattaaccggattctgaagctgctgagcctgataatattcccgggacgtaatcccgccgacaaaagcctctgtggtgagataatcagtgattttttcaacatagcccccgccgacgtccggcaccttttccaaccgctgaaacgtgacaacatgcgggaattcttcatagatcatcggaatgcctttctgtatgggtacagattcttcatgatgtgttgcgggaagtccgtgttatacgaatacgacacatcccccatacttctcccagacagaccagacggcgtcatattgtattcagccgctttcgcaacaaatattttcacaccagcgggcagcgcttttggatcaaaagtatttttgcattcgtctgcggcaacctcaattaaaatagggacaacctcagacaaataatcgtcatgcttatcggtggttatccctatcattcgttttacttgttggatgtccattggatcaccctttcaattttgtaagcagagtttcacgcttcatgttgaaataaccgggtatctcctgctcttttgcttttctcttcagttcatcaagagtcattttgtcataatccatagttttcaaccgtcgcattctattaaaagaagccagacccatgaagaccggcccccttacagtttgtgtttaaatgcaaccatacgaatgtttttaggctcgtatacacgtttccagttagaaggatcggctaattcctcattcgttggtgcaagcccagcgacattgtttttcacgaaacgcacgccgcgtggatgtaaaaggaagtgttgacgattaatgagaatgtcttcaccttgcaagctgtcgcggtctacttcggtaggtgttggcgctgctccgttcccgaggccgattgctcccgcaccaaataaatatgaagtatatacttttccgccttcctcaagggtttcaacaggcatgctgtcatccacaataacccgcttttcttggtagaatggaatttttgcagccgcctctgaatccttcacaaattcaataaggttctgcttcttcatttccgcataagtattcgagtgaacgccgattgcagtcaatttattctcagcatcccccatcacatgtgttgcatcaatgaatgtttcaccattgaaaacaccatctgacaaagtagaaatatcaagaatattgtctttcatcgttggtgaagcgaacacaccttccagctctgctaaaagtgttgcttgtctgcgtcgtgcccaatagcttgccacaagcgcagcgatcgcggccattggatcactaccagccaatgattttgccaactcatttgctccccatgctttaccacgaagcaaaagcaccgcttcatcaaaatctgatgtgattttttcaggtgtaagaggtgttttgtcagataaaacttcgtcctctccctctaaatcatcccaaaaaggcatttgaatagtggtaccgcctgaagaggctaaacgatccaattccggattatttgagataatcccgctctgttgtaatgctgataattcggctgttctttgaattacatatgggttaaaaacctctggaacgataacgtccgctattttagttgttgccattgtcatttctcctttattttaaattaagctgatgttcccggatcgcctttttcaccttttggacctcgaggaccctccgggccttgtggtcctgtatctccttttggcccctgcggacctgctgggcctctatcacctttagggcctctttctcccgctggtagattcacattgcgaagaaaacgcggaatgcgttttttcatgccttcacacccccattactgtgcttctttttgcaaacgcatcgctaattctggattctctctaaaaaggcgcccttgctcagtcagattcaacgtttctttcttaaaagggtttgcaggcgtctgcgttccggattgaccggatacatgcggctgcctacctgctaaagatggagcgcctttttgatcttcctcaaaaagatagctatcgctttccctgagagccgttagctgttcgtcaagaccaatcactttgccgtcacctaatttcaaatcctcaagatttaaattggctttaacagccttgatgttttttgacttcgcatcacgtaatgctgattcaatcgcgaaatcaaaagcctgctgatctaatttttgctgatattcagcagcagtcttctggttttcttcttggagactttcaatcgccgcctgaagctcttcgttacctttagcctgcttctgcaaagtgttcaactgctggtcccgttcgtcaagctggcttttcaagtccttcttctcattgttgactgcatcaaaacgctccttcgggaaccattgaccgttactgacaatatcaatcttttgatctccggctttttcgatcacctgagcatataaatcgtcaccaagcaattcttttaaactcatttcattctctcctttgatgtttttttgcgtgtccacctcacgcacaggatttacgtttgtttttgctctaaacctttaaaacgagcagcatgcggcccctgaccgtttcaccctcttaaccgcttgttgcacccctcttctatgcaaccaccgcatatttacttgctatctatagatttgtaccactcttcataggtttggtatgggattgtctggcctgacccgctaccgccttccctcgcccttctcgtatccggcagagcgccgttcactttaaacgcaattgtacaacggcagtttatatcgtctttcgcattattcatgtgccccggagccggaccgacaccgccgtaaattgatttgaagagtccattgcgttctattgtcttcccgtccagcttcctgtgcccggctcgtgttttaagatcaagggtagcattccacattttttcaagattgctccgctttgaggctttctcagcgctttccattcttgccgatacttgtaccctatgagcttctgttctcgccacgtcacgggctttccggcgggcaaattcggttgctctttcaatgcggcgggcgatctttgaataatcctcccccgcttgtaggccctgtgcgacggaaatttgaatctgccggacataatcgtcgcgatgccgcctgtatatcgctgacaaagtcaattcagctatggggtttagaatggcctgccgaatgacttcggctgtcgggatgctaaaacccaagttaaccacggattccatttcaaatagataagcagaacgcatataattctctaaaaactgcttggctgctaatgcctcaacaatagttagaatggttttgaaagccttgtgagattcctcggccatcctctccatttccttgttcagacgattgtatttgttggcatcggctaaagtaagctggccgtccttactgtatttcgcatacagccgggcaatttgtgcattggtctcctttaagcgagatgcaaaaacgacatcaatcttttgagcatcctcagtgatcatgtcgtccaggtacttatcaatatcattctggttcatcttcatcaccgcccacgtctgtttccacatccgttaacggcggcatgctgttcctgtattcgatttcttcagattcaattcgcttcatttcagcttctacatcgtcaacccatggatgatgagcgagacgagtttctttgcttaaatcagtgctttgattacccatctgcacctcttcaagttcattggtcatacgtgaacggttgaatgtcatttgtaagagagtgtgatcgtattccccttggccggtcatccgcaaatattcagtaaaaaaccaaaagaaggcatgcaaagccggacggaatttcctctcagcttcatttgccttcagatcaagtaaagaatataggtttttaattgcaacgttcgtcggtgaatttcccactttgtcaggattattgttaactccctgcccgaaccggtatatattttcttcaagtcggtcaaggtgggtgttcgcgctgtcaatcggtacttcagcagttttcatatccattccgccatccgaaccgacttcaacggccttgtaataacgaagatttgtcatgaactcgctcaaatcttgaccgccaaaatttttaagaatgtatatgaagtcttgcatttcatcaaaagtatttgcgttgtttgaaatgttgctgttgtactgatcaattaaatccttgtaaaaaacaagatcgctgacgccttcttcattgttcttgaactcgattaagggtacttttccccacccatacccggcattccctaaataaaaatggctctccggattttgttcgtagtcaaaatcaaggacaagagcgccatcgtgcatgacgtagtagaatgtctgctcatccgtgtacaattcgaccttacgagtgtattcatcatcaatgtttttcacatcataatacctgattgcatacaggagcttccgctttttcgtggtatcgtataccgcaatgacctcttcagcaggaatccggataaaatcaaacttcccgtcttcatcaacaaacgggtggagccattcactgcctttattactggcgtttttcaaaagctcattcattacgtcatcaaaatcttcgtttacaaagtcattgaccaactccaagaactttgaatcttcagcattaaaagtgattggtttcccaaccaggtattgcactttctgttggaccagcagcttgtgccagttatgagaaatacggttattgggcttttccgtatctatttttcgtacgccattctcatagaaatagcgcagtcttttttttatgtcggcctgattcatgtaatatgcgacgccctcaagcattcggtcacgatctaattcgtgtttatcaatcatcttttgaataaccgtagtgtccggcagagtatctgatgtttctgcactgtcctgaatgattttcaacagctcttctgtgtgtgttggggttattggatacaatagaaatcagctcctttctttttatctcgtcatgacccgtacgcccggtcgcttcatatcccgttcaaaagcataacgggtagcatctatagtgtggttgtcagcgtcctcaagccgcgccttcggattaccgtctctgtcagtctgatagtcgatattctcgaattctcgggcgatattaggtgttctcaacggatcaataataatggcgtctaaatcatcaagccattcttcgccatattgaaccgagtcaggtccttttttcgcgcctgtaatgcgccggatgccatggtctattttcaattcatcaatacttttaggttcggcactgtcagcagtaatttcttgactctcatatccttttgacctgatccattttgccagctctctgttggaaaccttttgatcataaagctcatcaatcgcatagatactgttccgcttcttgtcatagtgccacctgacataagcgagaggatcaggaccatatccaaagtcaacgccctgccggatgttgtcgaaggagcgaaccatttcatcagtaatgcagccgttctcgattttcaaattatcaaacggcacaacaccactccctaacgcttcgccgagatattcccatctgtactttaatgggttccgttccttaacgatctcagcctcttccttaaaggcttttgagatataaggattttcgagatatgttgaatgatggatatatgtgttctttggtacgaatgaagattcatattttttgttaacccacgattgctttcttttcggcggattgtatgaatagtaaaaagcataaaaaagaccgtccgggagttcagcccgcaggacggaattttcgatcattgaaatttcttcttcaagtttaaattcggcaagctcttcgacccacaggaaggcaaccggaaattttgcgatcttgagtgatttgatttttgccggatcgtccgcacccctgaagatgatgctgtttcccctgggtttgtacgtgagcctcatcggcgatttattgacatgccagtattcacccacgcccagcagatcaattgactctttaagctgctcgaaaaccgattcccctaatgtgttggcgactttccgaaccacaagtgtactgaccgggtatttcatcatgtcgttgactattcgggtaccaatatgcgtcgatttcgaagagccgcggccaccctttaagacataccggaggtatttgtgactgttggctgccgcccagaacgatcggaattttggcgttacgatgtccgatattcgcttaaccttcgtcaacgtcttcacttcctatatcatcaatgatcgtcacgccgctgtcttttggagcgtctttctcgacttcgttccgtgttttctcgatattcaagcgcatttgttccagtttaaggcgccgctcatcttgctcatgcgccagctggtcaaattgcttgatcaagctccggagctcgcccattgcccgagattgagcgttcaggaatgttgcatgacgatcccaagcgaattgaaactcccattctcgctcatcgccaaacatacctggcttctcttttttcaaaactttggttacatcatcttgatcctgcacaaacataatgcgttgcgcccgtagaatggccgcgtattgaatctgaatctggtcccatatcatatcagcaggggaacgctcctgaatctcttccatgatttcaagcgtttcttccggcagatactttgagaagaacccatgtgttacagcgttttgatttcttgccggagccgccccgccgctatttcctaatgcgtttttgttgccgggttgcccgcctatttttgtgtgcacacttttttcaatgggtgcaccctttttcctttcccaaccatgccgctgcttccacgatttaatggtgttcaccgacaccccgtacttctcggcaaggtccttgtatttcatgcctttgacgtaatccttatacgcctgaatgtgcttttcagccatctacattcaccgccgcccccttctgattcgtgtttgttttggaaaagatattccctctaaaccgacgccgtactcagaccgttaaccaccaatagtttttctgagatttatcggaatcagtttacagagaacataaaaaagcatcctgaggaatgctttttagtagacactaatgttatctttaagaattttaaagtctttgtctattatttgttcaccaattgtttttaattctccatttattctagaatttttcacatcaatagaacgagtgactatttcaatgcctgtaataattcctattaacccatcacatatagcattatgtgcctcttgcaatacttcgggtggcttttcttttagcactttttttaataagttttggacttcttcagacgcccagtagtagctttccaataatttctcaagatctcttctatcggaggtaattaatatattggttttacctttaatagagcttaattcagttgtgatttcagcaatttttctctttaataaatgattagccaatgacagtattctcacctcaaccatattgaaaatgaaatttttccgaatgaaagaacctatcataaatagatgcagtcgttagaataaaaaagcaccccaagggatgcccatgttatttaatccaatctcttaattctttaattgtgttatatgttttagcccaaacattattttgctcaaggtattccataccgtcaaaagtaatttttgcatgttttaataatgtcatttttacagggttacccataccagctctaatgacagttgcattttcaattaaatttttacgttgcatcatttctacaacttcaccaaaaaactgaagatctgcatcgtaatcggtatatctaggctcaatacctttgtccatctcttttaaaatactataaactagttttctgcgatccatttactcacctcccaccttattatcggttaaggagtaggagaaaggaacaatccgcagaatttgtcgagcgaaagcgcccttcataaataggtggcaaccgtaagacgaaaaaagcacattggattactaatatctatatggtattttagatttattaactgagttttcatcaagatggtcataaccattcatttccaaaaatttcagtattccgtctttggctatatccatattattcttcggcccaattgttaaacctttaattgcacttttatcatggaatggtacagtaagataaggaataaaagtaccatttgaaactctgcaagaatagtctaaatagtccggttcaacagcctttggaattaatgctactctgtactcctcttcttgagaaaaacatgaatctttaaaaaagacagaaaaaattttcacatacaaagacaagaaaccattttgataactccattgcgaccattgataagggtcatctaatttgttttgaaaaaacaaataacctccaataaacttactcattagctcttcgatcattttcctttgtgttttttcatcataaacaactggaaattccaatagatcataattatctaaatttaactttccaaataaatttttagggtcaagaacaatattataaccatcattatttgtataattagaccaaagtaaatttgaatctgaatttgtagtgagtgacattacatagacaggtttttttaaaggtttagattcaataatatatttaaaatggtttaagaaactgtcttttgattcgccgcaaatatctgatattacctcttcacataaattataagtgtacaacagttcatttttatcgttcaaaaagtttgcatcagatagccaaaattctttacgttttaaaattccttctaccccatagatatttgtataatgatagagtaattttattttctttttctttttgctttctataaattcataaacgaaattgcgaaaatcctgatggggctgtattgtctttggtttaatatcttttaatttcaaaaccttaccctcccagtttattatcggtaaaaggataggaacctttgcaaaatttgtctaacgaaagaatcgttcggcttctgagattctaccggttacacccgattaccttaatgcttcagatgtcgttatgacttcttggcccataaactttctcaactcgtctatactctcaaaaataaacttagccatttcggaggtttctccattttagggttatattaattatagtcaataccaaccagatcattgccaaaatcatagtaataatatcgagagtgctgagatgaccataattaaaattagtgaacaatatcacaaacagaataaagaataagatcgttgaaccatcgattaattttttcatatttgctcatttccttctatgtttttgaaaatccaaaatatcctctttcagaaaaagcctgtcccgaggcatttctttcatcggctctaattccccgcttttaactaactggtttaggtattgacgagtgaagcccaatatttcaattgcttcgcttgtattaacggtttcctcatttaagaaccgtttaattgcatcgcgttctttaagattgtacataatatcatcctctttgaattccctaatttgtaacaataaacaataccattatacctataacaatagtagtctttaaaggattttttgaaaacttttcttatatttcaataaataaacaacctattcatgctaaacagaataggctgtgatctgctctatttttcattttcaggcgagaacgttcgatgttcttctgcacggttccttttttaatccccaataactgcgctatctcttcgaatgacatgttttgcacagcgtgcatcatgaaaatgtctttttctctttcagtaagtactgaaagagcatcagcgattctttccttatcccaatcacttacctctccctcagcttcttgaacgattgcgtattcttccgggaacgcatcaattaagcgcggatcagcaagaatcgtcctttgatatgcgtctcttctgtcagcgcctcggcgtgcgccgggctgtcttccgttctgcagccattcaagagtgaattcaatatcgctgatcatgctactgataatctttttgtcgtttatttgttcagccgtcagattaacttcagccgtatctttgtagagccggtacatttttcttgtttctcttaaagctcgtttgtattcaatgattaaatcctgcattctgattcctctcccttatttgcgcttaaatgcgccgcccttgcctcgtttaagtctttgcatgttcgtgttcatcatttgttgccagaaacgatctgagcgctcctgcgtgtttttattgggctttttctttttctgcttcatgtcatccctccgctcaaataaaaaacggacaccaatcagagcacagtgattatgtgcaatgatcagtgtccgcaggctttccgtcttggacttatttaatttgaattatcctcagttagagaactattaatgtctgaaagatttgaaatgttcaatgtgctaggatcaattcccattaaatgaaaagctaattgggcctgtactaatgaacgtaatttttcatcttgaattttatccgccaagtctattgattcttttctattagaattttctaatacactatcatggtattcctttacacgtatccgtagcttttgtgactcctttaagaacataagtgaaatcccttcaaaaattaaacttccaacaacactaattgcactactaacagtgttgtctgagccaacagcaaaaatgatgatacctattaaaaggataaaaccaactatagacataattagaccaacatagaattgcaaatttgaatgattagtagcttgttgttgatatatacccaatgttctttcatatggtttttcatgaagttttttataaggtttttcatagggtctttcataagatctttcatgagactttacttcttgttcttgtttcatcacatttttttgtgcttcttgttcttctttttcatcgagattcttagtatgttctttaagaaattcaaattccctcaatgtccttaagtatctctcttcatgttttctctttataagtgtaaaaactgtgactaaaaaaaaggtaaggccaaaaaatattgacatcagcgcagaaagagcttctggtgaatcaaatagagacaaaacatccttcaaaccatttcctcctgaaaccgattatttacaataaaccctattttatcatatcggcgttaatacgatttctattaatagttaccctttctcctctttcttttcatcccgtcaccccatcaatcccggcaggacagcgacagcgaagaagaaaagccccacgcatgccccgaccagccagatatttgttttatcccgtttagcgataatggtatggtcgccaatcatttttaaatcgtcagatcgagcgacaagcgtcgggatgttgtccgggtgaacctttaaaagctcggccgcctgctcgacggtcattgcttcgtccttcgtggccttcacgttccgctggagttctacttgtaatggcatcattccgcatcaccctccaattcgttttgggcaactgttatcgcgaaactcagattagtaatgatcttttctaatgcctgtttgtatcgttttctatccccgcttagatgctgaatgtccttttgtgcctgtcgaaattgatgaactgttacttcctgctgacgcttgttttcctcgatgatttcctgctgcttaacagtctgttcagcttgctcaataagccaagcaatttccttctgaggaatgtatgtcagttttttcagacgttcaattctttctttcatgcccgttcctcccccgcagggggaacccctgctatttgaatttatggccaatctcgtaatcacaacgagccaggccgccttttattgtttgaatgattgttttaccgtgttccgggacgtccattagatgagcagtcccttcagtgccatctaaaacgatgatgcggactttccccggctcgatgctttgctgaatagttgtttcctgattttttatttctgttggcttgttcactctggccgccccctgtgctatgatagaagtaccagttcatatcaaaggcactgaggcgcagcttcggtgcttttttacgttttacgacggcagccgcatcgttaatccggcagatggctttaattcctcacggtagatgattggatgcttttcgacgtatgccgccaactgctccggcgtcattttccactccttaactggaccagacttgtatggatcaattttttcttgcatgttgttgacctcctgattatttgatttaggatctctacaaaagctacctgtcatgacacaatctcagttataatgacttccacacgtggctcttcactgtaaaacttactgaccttcaaatcgactacctgactatcatccttgtatatcagatgatttaaagcgtctttgacaccttttacatagttatcgacgtccggctttgttacagggcgtaacagccctttctcagcgttctcctttttcctcttggatccggatacagctttcggcatcggtctgaatactctgacatccattgccacaggtcccgtaataacttgttttggccgatactgtgacgccaccagtgcaacatattgtttaaaattctttgatttcaaaggatcatgcattttaaccttgccatttataacagatcccctcggcctcccctgtgcaacaggctcgccgtaaactataaactgaatggaatccaaccgtcattacctcccgtcaatttgttcccagtgctgaatctgcttttccttgtacggcgctgtgaggataatggccggcagcaggataaccgctttaagcactgtgcatcagctccatttgtttgattttttcctcaagcacccggatcgccggggtaaggtcctggccggccgtttgctcggcgggcccgaacagatacataccgctggttgctgtgaagttcgctttttccgtcattcccaatctcctaacctatggtttaattgcatccggtcgcccttgatggtcactgtgtaatctctgcacatttgatgaatgcgggagcccagcgcctcgtcgatgtccaaaatttcgaccgtatcaagctcggaagagattagcagaggcttgtgattcaagtaccggtaattcacaaccgattgaatttgttccacttgccaatccgtcgcccgcggcccccccttcactggtttgaataagtcatcaatgaacaggacctcggctttccgcatggcgtcgagctttgtttccagctggtcaaagtcatttcgcagatcgcccattccctctacgtacgggaaatacatgcagtaaattgattttttcttgatcagattgttcatgatcgccgttaacagatgcgtttttccgctacccggctgcccgagcaaagcgatactgtttgaacgttttcccatgatgctgagaaaatccttatagtattccactgcgcactcataagcgtccttgatcatgtccggcttcccgttcttaatgaagtttccaaaaaggagcttttcgaattcctccgtgatgccgctggccttcataagccgggcgatctttttccgcttcacacactcgcattgcttggaaaatgtggttttccattcccgggccttatccggcaagcatactttcccagccaggtaatcctcttctctgaccatttgatcgggggccaggctctccattgtcatatgctcttttctcagctgacgctcggtgtcttggtgaatccggtaaacgataatgcccttatccttgcagtcagagcactcatattcagccttttcttctgaggcggcctgtcccgttgaagatgctgctgaccgatcccggagcttggttagaatggccttcattgccgcgtccatatcttgcgttttgcgagcttccatactgctgtttcccctttcgtctctggctaaatgggtttgagaggattgcttcaatgtaattcaaattgacgttgttgcccttgcttctgaaagcctgtttcattgcctccatgactttctcttcgccgtaatcatccaccatatacccgagccgctgaacctccatcgtgccaatggtacgggctgttttgttttcgaatagttcaaatgcttttttcattctttcgtcaacctcctgctgtcctaaaggtattggagccgggcctatcttcttgttataatttccaagctggatgtactcggcataattcaacaccgtcacaatgaaaccgcgtttttgcggcagccggtccagcttcaaatactcttgctttaccatccgatctaacgagtatttgatctgatcagaagaccagttgaaacgcttggctaaatctacaagcttaacgattgtctgcccaagctttagttcttgatctgccctgtactccgcccgtttgaataaataatcgtatattgtctcatcacgtgaatccttaaatggcagccgaggtaggaccacataccccaaaccttgcaaatccatgccgctcacctacttcctttcacacagtgctgtcagagccttgaaatctatttctactaatctcagagacggctcatttgtctttaagtagtcagtcgtgtaccgggtatacaagtcctttctcatgtggcgctgaaccgttttgaccagccagagataacaatgtgggatgggaatcctgatcaactccctttccatcagctcaccaactccgaaaaatggatgatgctgttcagttgattagtggcccggcaatacttgcatttttcgcatcgctccggcttctctccgccgtgtttcacttgcaaaatccgatccatccgctgctcaatctcttcaagctctacttccatcctgccttcatcaatattgatgacagctttatcaggtggatcttcttttgaaacccctacaatcaggggctcaagccattcgttacgcccagtcattcttttttcaagctcagcatacagtgccatttgtgcaatatagccatttgcctcgacgaatgagcaatagcctatttccggatgccaaaccctctcccggagtgaacgggctgttttcagatcggcaaaacggctgccggcagggttgtatacgtccagcttgcctttccatgaaacaccgaagagttcggccgttacgataacttcctttgctccttgcagaacgaacatacagagttcgtcatgttgaatcgcttcaatcatcagatcagctaactgatactgcttgtacagctggcccttttgtgtaaaaagtgatggagtgttctttttaaattcatcaaaagcctgttcaccctcaagccaggcatgaacgtattggccgaagaggagcgcctccgatgtaggcggtgtccattctccgttcagctttgccatcgcggcagcctcgcactgcaaaaagcttttatattgagaatttgacatgtagtatctatcaatctcgttagagtaataattctccttgttcagtgccggtatccgcattagcaggatcacccgccttttctttactatcagcaggcttgtcagcttgctctttctgctttttaaattcttcctcagcctttgatttagtcgcgccagtggccttcacattgaagtaatcctctttcttcgccatcccatctcgcagtgacgtgtaaatacggccaattttcaggaaatcttgctcagtaaaggcatcaacattacttccgatgtactcctgaatcatttccttagtgatgccaaactcttttttaaatagggagaaggcgcttctgagccggtcttccagtggttccttatgaccgctaatcaatgttttttgacacatatctaccgccgcatcaacgatgtctcccgggatcactccaagtatgcaggcgcgaacccggcgggctccttgattggcaaccatttcgtaaatatccctcggatcatcaagtttggtaatggagcccctcgccttccgttcatgcttcacagtgaaaattttggtttgccgggtattcgtttcaagatcccaagcgtaagccatgacagatgattcaccggccttttgttccaactccataattccgtaatcaatgttcccccaattctgagccaaggcctctgccagccggatagatggaccggagacctttgtgccgccacgaggatattcatacactgcattctcggccaaaagcctccgttcgcatgcttttttaatccggtcaaacgccgcgtatacgtcccgtgggaatttctttgcgatgaccattgccgcctgtacttcttgagcctgtcggcttaccatcgcttccgtagtcacgccagtagcctgctgaggcgctggcatgtaatctgagtaatctacctgtgataatccattcattgtgcttctgccacctttcttttgtaggcttccgttccaagacgctgccattctcggtatgcgtccattgacgggaaggaaaataccggtttgcctttactgaacatgatcgagccgccgacttgtctcagacgcttctgatcgtccgcccggtcactgaaagatgctgttattcgtttaaccatgtgtaaaacctccattgtcttttatgaggtaatttggtataataaaggaactaatctttaccaaaagaccttttgaagtccactctgccaagtgggctttttttattgctcatttttaaattcaaaaccaagatgctccttcagataccgctcaaggttttccctcaagatgacttctccttcagcactatctatcacgtaatcatcgaaagccgttacttcatccccaaagaaatctttttgcgtttccggctcagtcagcttgtcatgccagttgttcaagaccatcgggttttcaatattcatcgcgaacacctactcacaacactcaggtgaatcccgcgggctgccatatttaaaacggtttgatgtaagtgccctttattggccagcctattaatatcctctgcaataaccttgatgctccctgcaagactgatagcttcttcgtaatcgccatcccgtaacgcctccgaaagcaagatagagagctcttccgccgactcgattttcctttttgctaaatctgcatctgctttaagaaactgattgattttcataccagcaccgcctgcctttcttctgttttcgccattgcaacctgacacattagcgctttccgtgtccacctttcggccagttctttcatgttcagtccatgactacgggccagcgaatatatcagcgttttgtttgccgggatcagatcaaaaatctgcttaatatcggccatgggcagttcttcaggttgtcggcctggcctatcgtttgccagccagcgcgctaaatgccttgttgcttgcaatgcttcttcaagttggtgaaccatgttgattaccgctgcgcttgcgctctcattaagagctgggtctattggagccgccgttgtcgggtgcagccgaaaaagataatgtacgagatcaatatgttcataggcctcacacgcctcaaaccatctgatgcataattcgggggtcagcttactaaaaccattttcaacatcggaaacgtaacgttgatccttcccgcctatcaaactgccgatctgatattgtgtaaacccggccgctttacgaacacagcgcatgatcttcggtaaattccgcaagttgtacggattgttctccatatgtttgcctcctgatatattcagctgtttgctgttaaaatttaattagggtcaaaagatgttttattgtattggcttatgattttttcgaatatccggcctcatgtctctaaatttcgctttgtggccacaataaaaacgaacatttactctatagagcctctttcatgattgcttgttcttgagcttcgatccatgcatcaatattgtgtttggtaaagaaaatccgatttcgcacacgaaagtgaggaatttgtttttctcgaaccattgtgtaaattgtgtcatggtgaacacccaggtaatcagcagtttcttgaacagttaatgtgttacgtatcataatcggcctcctaagcaacgcgtcatttactcgtttcgtgtaacttttgatcaaaaaaaatctcatcgacatctttattcaacaacttggatatttgatgtgctttttcaagacttggctttgtacgacccatttctatattcgcataaccgcttacagatctgtagccgagctttttagacataaaggtttgggtctttccttgagaaattctggtcgcccgtaatttttctaacactattaactcaccaccttactctttttgtgtaactcgttaaacccataataatatacacaataagggtaagtcaatatatttttattctttttgtgtaagttattatctgttgtgtgtaaaccatgttaaaatttacacaccaaatgaaaaaaggtgtataataatggataatataacagggaaaattctaactgaattaagagaaaaaaaaggttggagcaaatcttttgtcgcaaaaaaattgggtataaaaacaatgtctacatatgcgaattgggagtacggtttaaggaaaccggatggcgagatgcttgtgagaattgcaaccctgtatggtgtaactactgactatctcctaactggaaaagaacctaatcaatttaatactgaccttttcgatgattctgatttacaactcgcctttagagaagctcgtgatttctcagaagaaagtcaaaaacaggcaattgattttataaagtaccttaaagagaaagaagaacgcgaaggccgaaagcctaaaaagtaacatactggcgaaacccttatttatattatttattatgttatttctgtttactaataagatctgaattctcttccggattggtcctgaatcccttctggaaagttaatatttacaagcccttccccccttataaaacaaaggtttcagcatttaatcccttccggattctcttccgaactgattcggaattctcttcggaaaaaatcaggataaatccgagtgttaaactcgattacataaagaaatcatcattaattaaaggggcatgcaaattggcttttacatttaaaaatgaagaagtttataacagtgtagctaaaaagaaacgaaaggcaacagggacatttagaaaaacatactatgctgcacaaacattgctaggacaaaaaaatcaagtaatgattgaagttattttcggatttttgactggtccacaggtcagtagtcaaggattaattatcgcaacaaaagaaaatttacatcttgtaactgataaagctggaggtcacaaaataataagttggaattatgaagaaattataagtatttcagttctaaagcatacttttactggttttacacttgaatttaaaacagttgatggtgattacctaattaaaagtatcatggaaggtgatcatgaaaaacttataaattatgttaggaagtcggttgtcacagcaaacaaaaaaacatccgctgaaaacacttctaaacgtaaagtcgaagaaaacccaataaattctgattttgattttgttgcttcagagatcagaaaatatgcaaccttgaaagatgaagggcttattaccgaggaagagtttacagcgaaaaaaaagaaacttttgaatatataaagtccgaattttcgggctagtgtcatcactcagaagaatatgaagttatctgtaacaagggcggttgataaaggtgcttgagcaaaatattaagttatatgttgaatcttatttatcccaatataatcaaataattgatagtctatataggacagcctactcaacaaatccagaagcctttcgtttaaaagatagatccaacataaaaatttatttgataaagttatcttcacttctagggagcaacaataccttacaactctatttaaccttcgaaaagaacaaaaatcttgaattagaaatagttgatctaacaaataaagaactttacgaagattattcaagctttagctcacttaaaaaatttatatttgataaatcaggagaaaaagatgggttaaaagaaaataatattatatatagcgacaatatctctttttacaaaaaatcattatatgaagagaaagatgatttcgtttctaccctagactccaaagagtggcaggaaactataaatgcgcaaatgcatatgttagcatctgaagaaggtaaaagttttattaaacacgttaatcaccctgtaagttactatgcaaaaaatgctgctaggtattcttattctcttcttgatttaaaggcgattatagatacagtaaatgacgaggattttagttatcaaatggaccaagctatcgcggcttacgaaaattctttatacctggcctcttgcgctactttaggtgtatgtctggaaacgttgtgtaaattgttactgaaagaaaatggtgtaaaggtaaaagatagtgatggcactatgttagacagactcggcgagcgtttaagagaacagaaaatcatcagctacaaattcaaaagccgcatagatgtatgctataaagtaagaaacttatcttcacatacaagtccaggcaaagtgttgcaaggagattgtcattttattattgctactataaacgaaattgttgatacctatttcaaatgagaaagtccgttcagggcttttctttcacaccaaaaacagaacatatattcccttcatggtggtgtttttaatgtcaatccagttatcgtatcttgaagaagaagtgaaaaaaatctattacaaattaaatattgagactcctgaagacattgatttagaaaggattgccgcggcatttcgtatctggctgcattatgagcaaagagaaagctgcatgtttcaaattaacggtgagtatagcgttgtccttgatgctcgtgcctctccacaagaacaatggcaagactttgttcatgagctatgccatgtcttaaaacataccggaaaccaatttcacatgaatagaatgttcaggcagcttcaggaataccaggcgaacagtttcatgtatcacttctgcgtaccaacgttcatgctcataaaattgaaactgccccgtcttaaatcagaggccattaaattaataggagatacatttaatgtgacatattccttggccgctaaacggatagaaatattcaacagaaaacagttttcaattctctggcataaaaatcttcatcaaataagtaaattgaatgttaggaggtagccaaatggccagtatagagccccgtggaaaaaactcttttagattaattgttgagaatggttacgatgccaaaggtaaaagggatagaagaaagaaaacaattcgtatagaagatccaaagctattaaagactaaacggaaattacaagagtatcttgaggaccagctgcaccgtttcagaattgaagtagaggccggcgagtatattgctccggaaaaatccacttttgattcatttgcagaaaaatggattgaaaagaaactctttaataagaatggtaagccttactcttttacaacatctgttaaatattcaaatcacttaaaaaatcacattcttccagcattaggtcataaaaaaatagacaaaataaaaagccttcatattgttgattttatagatgatttatctaaagatggggctagaaaagatggaaagcctggcggattaggtgatcaaacaatcaaagatatttttaaaatcttacaagcattatttaaaactgccacagaggaatggaaattgataaaagacgatcctattgagggattgagttcgccagaagctgagaataaagaaatgaactttcttgaatctgacgaagcagctgaatgtattaaagtgttgtatgaaatagatattaaatggcgcttatattatcttgcagctctgatcggggggcttcgtagaggggaagctcttgcctgtgaatggcacttggatgtagattgggacaaaggtggaatatacgtaaatagatcaatttctaaaacaattaacggagagcctcatgtcaaaagcccaaagtcaaaaagttctcaacgattcgtcaaaatgcctgatttttatatgaatgagctggctaaatattatcgcttatggaaaaaagaaaaattattgcttggcgatgcctgggaaggcggagaacatcaatatgtgtttcacagtggtaaaggaaaaccttactactatacaacccctaccgcaaaatggactaaaatcaaaaagaagtacggtctaaaagatgttcgtcttcatgacttgcggcatactatggtggctctccttatggaagctggcgaaagtctcagtgctattcaacgaagagctggacatgccagtgctcgaacaactagtgatatttatggtcatgttaccgagaaactcgaaaatagcacagtaaaacactttaaccagttcgatcctagaaacctagcacaaaaacagagttaattttgaaattcctcttcaaaatcagctcaaaaaaaataatttcgtccccaattcgtccccaactcgatgaatgatgacaaaatcaataaataagcaaagtaaaaaacccttgctacgcaagggttttggctatgattccgactgggctcgaaccagcgacctctaccctgtcaaggtagcgctctcccagctgagctacggaatcatgatatgtatgtgttgctgggtatgttgttgtctctctgacatttataattatatatcctgatttctcattcgtcaacactttttttatctaaaataaaaaaagggcgcgtcgcaaaattgacggcgcccttttcgtttatgatctcacttgggcaggggttatttttttcaatgcctgttcgaagtcccgctctaaatcttcggcgttttcgactccgacgctcaagcgcagaaggccgtctgtgatgccgcgtttctccctctctgctttcggcatggcggcatgcgacatggctgcagggtatgagagaatggattcgacggcgccgaggctgacggcaaataccggaagcgatacgttttcgaccagctttttgacggcttctttgctttccaattcaaaggacaggacggcgcccgctccgctcgcttgccgtttatgggtatcggctcccgggtgtccggcaaggccgggatagtaaacgtttttgatggcgggatgtccgtcaaaataggcagccagccgctcagccgtccggctcgctttttccagtctgacctgcaatgtttttaagcctctcaatacgagccagcagtcctgaacgccgagcaccgctccaaatgaattttgcagcttatacagctgattgccgagctcttcatcttttacggcggcaaggcctgacagcacgtcgctgtggccgcttaaaaatttcgtcgcactgtgaagcacgatatctacgccgagatcaagcggacgctgcagagcaggcgtcataaaagtattgtcaaggtatgtcagacagccgtgatcctttgccagtttgacgacgcccttaatatccgtgatgccgagcgtcgggtttgacggtgtttccatatagatggctttcgtattcggccggatggcgcgggcgaccgcttctgtgtccgtcatatcgacaaaggtatgttcgatcccgaaacgggacagaacctcagtcaccatgcggaatgttccgccgtacacatcctccgtgacgaggacatggtcgccttgggataagagcagaaatgccgtcgaaatcgccgccattcccgagctgaaagcaaagcctctcgttccgccttcaagacctgcgatcgtttcttcaagcgctgttcttgtcggtgtgcctgagcggctgtagtcatatgtcccgaattcttcaaatgaagactgatggaatgtggaagcatgctgaatcgggacgctgacggctccggtggctccgtctgttttaaatggattgtgcacgagctgggtttccagcgtccaattgtgattactcatatgacacggccccctcttttacttgctgtaatgcctgctttacatcccgcttcaaatcttctgcatgttcaatgcccactgaaaatctcagcagacggttgcagacgccgtttgcgatacggatgtcttctggaatatccatgtgcgtctgtgtcgcggggtatgtaataaagctttccaccccgccgagactttctgcgaaacagatcgttttcagcgcctttaaaaacggattaacccattcctctttttgcagccggaaagacagcatcccgccttttccaggatataacacgtcggcgatttcttcttcctgttctaaaaattctgcaagttcacgggcgttttcttcatgacggcgcattctgagtccgagtgttttcatccctctcattaaaagccacgaatcaaacggcgggagaacggcgccgatcgcattttggtgattaaacatgatctcgccgagctcttcatcctttacgacagcaagaccggcaaggagatcattgtgccccgctaaatattttgtggcgctgtgaatgacgatatcagctcccagttcaagcggacgctggagcaccggggtataaaacgtattatccacaatcaaaagcaggccggcttctttcgtaatccgggcgattttttcaatgtccgcctcctgcattaacgggtttgtcggcgtttcaacaaataccgctttcgtgttttccgttattttggagcgtaaacagtcttcatcgctgaaatcatcgtaaataaagcttaagccgtattttctccattcgttttcaaacaaacggtacgtgcctccgtataaatcggaggatacaatcaattcatccccgcttttaaataaagccataatcgtttgaatggctgccattcccgagctgaaggcaaagcctctcgcaccgttttccaacacggcgatagcgtcttcaacgagctggcgtgtcgggtttttcgtgcgcacgtagtcaaaacctgtagattctcctattcctctatggcggtaagcggtggacagataaatcggcggactgaccgttcccgttgcttcttcgcttctatttccgatttgggctaattttgtatcaacatgctgcatcatcagtaagcaccatcctttttcaaaaataaaaaagccccctcttcataagaagaaggagcttttctcttcctcttatcttccaagcatgtgaatcgcttgctggatttagcaccttggcactttgccttcccgcggcaaagcaaaccggttgctgaggtttcaaagggccagtccctccacctctcgtgataagaatattgttttgtattttctgattgttctatattaacgcactataaaatgaatttcaataactttttatttatctgaactctcgcaagaagtgcatctgaagaaagaaatttctaataattcatggtacaataggaaaaaaccatcaagacaagaagcggcctggaggaatgcgaagtggcatcaaaaaacggaatcattcatgagaaaaaacttttctcccatgagcttgaagaggaaatgaccgttttggtctacctgcccgccaccttctcccccctgtataaatatcatacggtcatcgctcaggacggccatgattatttcagattagggagaatcgggcggcaggcggaagagcttatgtcaaaaggggaaattgaccgctgcatcattatcggcgtcccttataaaaatgtgcgggagcgaagaaacacataccatccagaagggtctaagttcgcctcatataagcgattcatcgcaaatgagctcgttccttttatcgacaaagaatacccgacttatcaagtcggatacggccgcaccatgatcggggattccctcggcggaaccgtttcgcttatgacggcgattgactatccgaacatgtttggaaacgtcatcatgcagtctccgtatgttgacgggcacgtgctggatgccgtccggcagtcggaggatctcaaacagatttccgtttatcatcaaatcggagaaaaagaaaccggcgttcacacgacagacggccaggttcttgatttcaccgcgccgaacgaagagctcaaacagctgctggaaagcaaacagtctgaatacacgtatgaaaccttcgacggggatcataaatggacctactggcagccgctcatcacgccggcgctgaaaaaaatgctgtaaccattcatttaaggagggaactttcatgaaatacggtattgttttatttccatcaaaaaaattacaggatctcgcaaattcgtaccggaaacgctacgacccgagctacgcgctcattcctccgcacctgacgctaagagatccgtttgaagcgacagaacaggaaatcgagcaggtcgtatcacagctgagacagacggcgaaagagtcgcatccgctcgttctgaaaatcacaaaatacagctcgttttctcctgtgaataatgtgatatatatgaaagcagagccgacggaggaattaaaatctctgagtgagaaatgctactcaggagcattatccggcgagccggaatacagcttcgttccgcatgtcacggtcggccagaagctgtcgtcagatgaacattccgacgtactcggacagctgaaaatgctggacatttcccacgaagaagtcatcgaccgttttcacttgctctatcagctggataacggctcatggactgtgtatgaaacatttttattaggcggaggagaataactgcttggaatccatcatcgcaaaaactgaaaaacagctaaacgacgcttttttcgtcagaaaagaggtctttgttaaagaacagcacgttccggaagaagaagagattgatcaattcgaagacacgtcagagcatatagtcatatatgacggcggccagccggtcggagccggcagatggcgcttgaaagacgggcatggaaaattagagcgcatctgcgtgatgaaaagccatcgttctttaggcgtcggagccatcattatgcaggcgcttgaaaaagcggcggcagccaaaggcgccgacagctttatcttacatgcgcagacgcaggcggttccgttttacgaaaaacaaggataccgcgtcacatccggcgaagaatttctcgatgcgggcatcccccatctggaaatgataaaggaacacaaacgataaaatcaaaagcactcctgttatatggcaggagtgcttttttatgaaaataaaactatttcatgaattttattgaattttatggaagatcaatgtatgtttagtatacgaagtattacaattcatacaaaaaatacaattcatatttcggagggataaacatgacggcaccaaaaggaaaacacatattcgggactgttaaagtgggcacaaaaggacagattgtcattcctaaagaagcaagagatgttttcgatataaatccgggggattcactgcttatgcttggggatgaccagcaaggtatcgcacttgttaaacaagaactctttttcgagtttgcaaaagatattttaaacgctaagcaaatcgacgcagatagcgaggatgagtaaatgcacgcgattgagctgaagcaattaacgaaacattataaagaaaccgccgccgttgaccgtcttgagttctcagttgagaaaggggaattttttgctttactcggtgagaacggagccggaaaaacgacattaatcagtatgctttgcggactcctttctccggatgacggtgatgcatcagtgcttggacacagtattttgactgatttagataaaataaaaccgaaattgaatatgtccccgcaggaaacagctatcgctcctcatctaaccgtacgggaaaacttagagtttatagccggtgtctacggaattccgaaaaaagaagcaaaaaaaagaacagatgagatgctcgaattgtttcaattaaaagagaaagaaagagcaaaaaccaaaacattatcaggaggaatgcagcgccgcctcagcatcgcaatgggaatgatcaccaagccggatatttatttcttagatgagccgacattagggctggacgtccgttcgcgccgcgagttgtggaaaaatcttgaggcattaaagggtgacatgacgattattttaacgacacactatttagaagaggctgaagccctggcagatcgtatttgcattttagaaaatgggactttaaaagcactgggcacggcggaggatctgaaaaagcaaactcattcagctacatttgaagatgcctttttagcgatttgtgacggggaggcgggtctttatgcttgatttcgccattcgcaaccgcaaagaaatttttcgtgaccccctgtctattatccttggaatcgccctgcctgttattctattgtttctgtttacggcgattgaaaaaaatgcgccgcttgatacctttaaaattcagcatttagcacccggactcattgttttcggttttgctttccttacgatgttctctgcattgctgatcgcaaaagacaaacagaccgcccttttgacccgtttgtttgcttcccctttaaaaacagccgattatgtcatcggttatgcaataccgatgctgccgttagccattttacaaatcgtcatttgttttatcgctgctgctgctgccggtttatccgccgagtggatgaatcttctcgcaggtatcgctgtcttgctgccgattgcgatgatgtccgttttcttcggtttatgtttaggggctgtgtttacggacaaacaaatttcaggtatcggaacgatttatattacactcgtgcaatttctgggcggggcttggatggaggtgagcctgctcggtgacacattcaaacatatcgcttatgccttaccgtttattcactcgatcgagctggcccaggaagtcataaccggagattattcttcctttcatcagcatatttggccgatagcgggatataccgttttggcgcttgcacttgctttcctcagttttatgaaaatcaggaagagataaaaaaagccggcactccgtaatgggagcgccggtcttctttattacgtttctttcagaaggtttattgtatgcggcagcagacgatcatcccccggactgccatggcccggaacgacaatgctgatgtcctgataccttttcatgactttgcggacggcgcgcggccacttatccggataaaagcccggagtaggcacgatttcctttgtttctaaagccttgattaagcaaccgccgaataagagcttatcctcaggcagccagacggtcatattgtcttccgtatgcccttttcccggataaaacgtttcaattttcatatcgccaaactgcagctttgtcacgtttttcaaatctccgagcggccggtcatatccctgctctcgggcgaagtcggcggtcagcttcgtgctgtgcacctttacgccgtatttgtacagggtgttcagcccgccgatacgatcatcatgggcgtgtgtcacaatggcatcggtcatccttttgccgggaaaccgcttttttatttgtgtcattaattgctctgtgagactgtcattccacggagtatcaatcagtacgattcctttggaagtctcaagaagcaatccgttcgcagggacgggacttccgtctgccgtaccggtgcttgtatgcatccaaacatgcggcgccagctgtgtgagagtgacaccttttgctgcggagccctccgcagcgtctgccggtttcattccggcagtaaagaggccgaatagaaataaccccgcaattaataatgaaagctttctcaaattgaatcattcctttccgcatctttcatatatacgactcaaaaaagcccggatatatccgggctttttcacacgtattgatttatcaaccggccttttcccatgatttgcggcagacgggaaagagagcgcttacgtttttcctcatgtactttcttttctgcggctgcggtgttttcctggcggcgctccacctctctgtacaccctgtcattggcaagggcggccgctttcgtaatgccggcataatcagacttataacccgctgcccggtttgcgtattgagaatactgctggttttgaatccgtcctgcataaatcatatgtacccctccccttcgctttcatttcccttaatcttactttttgaaacgctgttcttttgttatgatattctttgtctatcaaatggatgaacaccttttaatgggaggacccctttttgaaatgcgcccgactgaataaccgaacgatacatttacatacatattctagagaacattaccaattcctttttgaagaagctcagaaaggaaatattttttgcgcacattgtgagcagcccgtcttgatgaggctttcgattttagagcagcccgcattttatcaccggcaaaagggagacttcaccgcctgtgaaaaagcatgcgcggccgaggaaccacaagcggagaaagaaaaagaagagtataaggaagccggcatgttccgcctgccgaaaggaaaagcgatttcagagaatccgaaaccgatcgtctcagaatggaaaagcccgaaaaaagtgcctgcggccgaaccgttttcaccaacatccgaggcggctgatacatctttgttccccggcatcggcctgaaccgtgaacagatgaaggcagttactgaaacggacgggcctttattagtgcttgccggagcgggaagcggaaaaacaagggtgctgacagcacgcgccgcccatatgattgaacacctcggcatttcacctgagaatatgctgcttgtgacctttacgacaaaagccgtcgccgaaatgaaagagcggatggcaaatgagtacggtctggcagccggaaaagtctcccgtctcgtgaccggaacattccacagttttttctataaaatactctgtcattatgattcttcaaaatggaacggcagccagcttttaaaaatggagtggcaaaaagagcaatatgtgaaaaaggcgctctatgaagaaaacttggatgaaaaagagtttcccgtcgaccaggcgcttcagcttatcggctgctggaaaaacacgtatctcccccatgagaccattccgcttgcggacgactgggagaaaaaagtgtacaggctctacgaacattacgaacggcagaagcaggaaaaacggcaatttgattttgatgacatggcccaaggctgttatgaactgtttcaaagccggcctgatattctcgcgcagtaccaaaacagattttctcatattttgattgatgaatttcaagatatcaatcctgtccagtacaacattatgcaaatgatcgcaagcccagagaataacctgtgctgcgtgggtgatgacgaccaatccatttatgcgttccgcggcagcagcccgtctttcattttagattttcagaaagattatccggcagcaaagaccatttacttaacggcaaattaccgatcgccgcatccgatcgtctcaagcgctcatgccgtcgtaaagaaaaataaaaaacggtatgaaaaaacactttctgccgtcaaagacggcgttcacaatcccgtgatgttttatccttacgatgaagaagaagaagcgaccatgattgtttcggatatgaaagagaagattcaaaacggggcgagtcctgacgattttgccgtactttaccggacaaacagcgccggacgggccatttatgaaagactgcatcaatcatcgattccttatcatgccgacaggggcgtgcagacgttctacagccgcagaatcgtacgccagatcctcgcctacttatatgcgagtcagaatgaagatgatccggatgcggtgaaagacctgctgcccgccttatttttaaagcaatccgccctgcaaacgttaaaggcgctgtcaattactgaagattgcacgatgattaaggcactgacgaaactgcctgacctgaagccttttcaaatagggaagatcaagcagatcgttccgtttttcgcaagcatccggacaatgaagccgattgaagccatcacctttgcagaaagcaaaatgggtttttccgagtatttaaaaaaacggggcaatgagggaaacaaactggaaaaaggctctgatgatctcagggatgtcaaagtggccgccaaaaaattcaaaaccattcccgattttcttgcgcatgtcgatcatatgcgcgccgctgagaatctgaaaaccgatgaaaacggcgtcgaactgctgaccattcaccgctctaaaggtcttgaattcaatacggtctatattttaggcgcggctgacggctcgatcccccatgacttcgcacttgagacggcgagacagggcgatcccgctccgctcgaagaagaaagacggcttctgtatgtcgcaatgacaagggccatgcagcatttatatgtatcttgtcccgcgtacaggcggggaaaaacagcgcgcagctcaagatttctcgagccccttcttcggacggacagacggagcgcactcaggatataaagaacccggcagatcactgccgggttcttctcacataaaaaggcctttttagcaaggccggctgacgcctatttattgttcagcattttagaaatggtgccaaaatcaagtttctctttaccgcttgtaatagattgaacgattttgtcttccaattctttcggaacacgcttgttagccagctgggacaccttctgaatgacgcctctcaccgtgttttcatctttgaaattggcattttgcaatgatcctgcaaggttcatgacatccttcatgctgacgcctgttttcttctcaatatttttgaaaaattgattatccatggtgtgcctccttttgtggagtaatacgatattgtatgaataaagagcggaacatgtgcccgtaagacaaggaaaaaattccgagtgccccgtctctatactcctttatacatcagggaagcacgggactgaacggtcccgcgcttatccaaggtcttgctaaggtttagccaaaaaaggatgcaccgacaatgatcagaaggatgaacaatacgacaacaagaacaaatgttgagccgtatccgcctccgacatagccgcctccgtatccgccgcagccgccataaccgccgtagccgccgccgaatccgccatatccgaatcccatatttaagcacctcctttactctgtatactctatgtgagccgacttgtttggcttggataaatgcatagggccggtgcggatttcatttcattttattgagaatgctcatttttcttcagttttgcttctgtctcggcggcaaacacatctatccattcctcaaagcgcgatcccgcttcatcaaactcagacagctgtttttcaatagataagatatatttgtcatgctccagctggttttgattgtgccggcggtatttaccgtttatgaatgattcaaatatattcataacatcccctcctcctatgatctatgccgaacagaggccggcgttcggcaaaaaacaaaaaaaccggaagctccggttttttagaaaacggctatttcggttttttcttttggccgcagccgcagccttttttcttaatttttttttcgtaaggctgatgcacagttgatttgtatggagagtgttgggaaggtttgcttgattgattcatggtgatccttcctttccttatgtcatatatgccagtttatgccgaaagtgacggtaagttgctggtggaaccgccttattcctgcagaagacgagaaaccgcagcttcaatgattccggccgcgccggctatggctaacagcaaaatcagccattgcgcagccccgggtatcacaatctgcgccgcaattaaaaaggcggcacaccacacgcccgtacaccagtagcagctgagaagttcaccgataaatgccctgatgccttttccttttatgacaatgtaggtttctgtcgtgccgtctggtgcggtttctgttttttcctcgtgaaaaaggctccgaagcggcgccataatggtgtcaaatacgaaaagcctggccagccggaaaacggcaaacgataacagaataaatgaaagccaattgataaccacctgttcactccttttcaaaacttgacctctttatacatatgcgaaaaccctgatcttcatgaatcgcaccttgtccggtaaaaaaataggtgcggtttagttgtttttcttattccgctcggcgtttcatttgcattatataaagtatgaatgagaaaggagtgaaggttatgtcgtttgaagaaaaagtcgaaacactgcaaccgcaaatatacgaacaattatccaacgaattcgagcagacgatcgaagtgattgattgcgaaaatgtcacaatagatacaacacatataacggccgctctttctatacaagcctcagttactacggcgattatcctcgcgacacagctcgcgatcgcagatgaagacacagccgaccaaatagcaaccgaactgctgatcctggatgattgccaaataaaaaagaggaccgtcattcaagtcctgaacagccgcaatattaaaatcacactgactgcagacgatattatggcctttgtacaaattttgtttcaattattaaatatactttttgctgaactagacatcctttaacctttcttttcaaatatttaaatagaggtgagaacaaatggcagataacgaaaaattaaaaaaagaactcgaaaatctaccagaagtggatccgcttttaaaggtgcttgtcagcaatgtcttcaaaaaacacggcgtgacaaaagataaaatgcgggaaatacctgatgaagaaaaagaaatgctgatcgcattagtcaaagacatgcaggcaaaaacagaagcttttcttgaaagccagaaacagaaaaaagagcaggaaaaagcgcaagatcagcagaccaatccgcaaacccgcagagaacaattaatcgaacagctccggcaaagacgccaaaatcccggtcaataactaaaaaatagtgatttttatcaggatagatgcctgagtcaaagtaaggggccggctcatttaatattagtaaaagaaaaggaggaatagatatggaaagcagaccatactcttgggttgcacttgatcctgaatgcgaacatccgcgagaagaaaaagaagaaaaagaaggcagaagatgcagtgtttgctgtaacggaaacggattcggcgaagataatgccttccttgaccaagaccttgctcaagcgaatctcaacaaacaagtttctgaagaagcgattattatcagagactcttgtgatattaacgtaacgtcaacagacgttcaagcagtcgcttcagtcatgacagcgattaatgcagcagtcgtaacggccactctcacttcaatcgctgacggagtcatcgctgaattggtcgcacaagacttattgcagctaacagctaacaaacaaatcaaccgtcaaaaactgctcatcgaaaactcccgcggcgtaaacgtgacaacagtagatgccgatatcgcagtattgatctcaacagcgacaaatttactgattgctgtcttagtcatcacccttgtcctctaaaaagaaaaagcagagctaaaaatgctctgctttttcttattttctccgcatatgatgaatatatagacgttcacccacaccaagtgaggctcgcgtacatatgttgttaaagacaaaagtcaaataccctaaaagaaggagctgaaatccatgagctgcggaaaacaccatggccgagatgaaagttgtgtatgcgatgcagtcgagaagattttagcagaacaagaggctgttgaagaacaatgcccgactggatgctatacgaatcttttgagcccgacgattgcaggtaaagacaccattccgtttctcgtatttgataaaaaaggcggattgttctccacattcgggaacgtcggaggatttgcggatgacagccagtgctttgagtccattttctttcgtgtagaaagactatgcgattgctgcgcaacgctttcagtattgcgccccgtagatgtgcacggcgacaccctcagcgtctgccatccttgtgatcctgatttcttcggtttagaaaaaacagaattttgcattgaagttgatctgagctgcttcagcgccattcagtgcctttcacccgagcttgttaaccggcctgcgccgcacaaagagaaaaagcatcacggatagtcattgattcgcatctttcctaaagaagaatccccttccaaccttctattacagatgcaatcatcagcccgcccggacttccgggcggctgactctccgctatcgtttaaaccggtaccatttaaaacgtgaagtcaggagggatattatgagcaagcatacaacatactgtgtgcgtgaagcggtagaaaatattgaagacctgcaaaatgcggttgaagaagattgcccgacaggctgttattctaaacttttatctccggcttatacattaggcgatacagtgccgttcgccatcttcacctcaaaatcgaaaccgttcaccgcattcggaaacgtcggcgagctggataacggtccgtgctttaataccgtttttttcagagttgaaagggtctgtgacggctgtgccacattaagcctgcttattgcttttgacgagcataagcacattcttgattttacagataaagactctctctgcgatgtattccgtttagaaaaaacgaactattgcgttgaagtcgatctccatagcttctgcgccatcaattgcctgaacccgagactgatcaaccgcacacattcttaaatcaaaaagcataaaaataagctgccggatgaaagaattcaggcagctttttgtatggttaaaatccaagcggatgcagcgaggtaatatcgtctattgcgagttctgccggcgctccgttgcttgtcgtccgcaggaagatcgcattattttttctgccgacgattacgcctctgtaggtttttccgttggcttctatcagacaaagggtccgcggcatattatgcggcagcttcgttaagaaatcaattttttcaagaatggacattctgctcatcggctttttcacgcgctttggcggaaccttttcctctggggcggcattgtgaaccgcttcaggctctttttcagcggcatcaggctcttttttagcggcgtcgggcttggcagtgtcctgctccgcttgcgccggaacttcttgaacggcttcttctgcgcggctgtgctgttcaggtacttgcttttctggttcgacagccactgctccttcaggctgagtttgacattcttcctcccgctttccatgcatcggctcttcttccggcggctgaggcgctttcctttttttgattaatatgtcctgcattgatgattgcgtgtctgaataatccgcctgaacaatatacatgagcggttttttttccgcgtttctgttttgttttgacatcttcatccctccgattctgtcatgttttatttatatgacggaatgattaaaatcagaagaaagaaaaaagcaatccctgaaagggactgcttgttatttaacgtgcggtaatatggaatcctgaatcaacgtgaagattttcgcccgtgatgcctcttgacaggtcactgaacaagaatgcagccgtgtcgcccacttcttcaggtgttgtcgtgcggcgcagaggcgcgcgctcttcaatttctttcaggatggagttgaaatcactgattccttttgcagacagcgtacggatcggtcctgctgaaatgctgttgacgcggatgttttcttttcctaagtcagcggctaaatatctgacgctcgcatccagagacgcttttgccacacccattacgttatagtttgaaacgacgcgctctccgccgaggtaagtgagtgtaacgatgcttccgccttcagtcataatcggacgcgccgcttttgcgaccgctgtcagagagtaagaactgatgttatgcgcaagcaggaatccttcgcggttcgtatttaaatattcgccgacaagctcttctttgtttgcgaacgcgatgcagtgcgcgatgccgtgaatcacgccgacctgctctttaatgctcgcaaagcaagtttcgatctcagcgtcatttgtcacatcacacggaaggatgatggaatcatttctttctaatgtagccgcaaggtcatgaactgatttttccaagcgctctcccgcgtaagtgaaaatgaggcgcgctccggcttcatgcagcgaacgggcgattccccatgcgatactgcgtttattggcaacgcccatcacaacgatgttgcggccttcaagtgagaaattcatatgtataaagcctcctgtaatcgtcttaaagacatagttttagtacctgatcttaatttttatcatatcataaccttgtccagattgaaagcatgggaaaaagaccgcggatgttgaagcggtctcttttttatctcgtctgcagactgttccttttaaaggcaaaatgattggtcgggccgtgtccctctccaatgccaagcgtatgttccacggcttcccgcacaaaattgacggctgtctcaaacgcggtctgaatggttttcccctttgccgtttccgccgtcagcgcggctgcgaacgtgcaacctgttccgtgggtgtgtttggtgtcaatataagcgtggctgatttgggtaaaagacgaaccgtcaaataataaatcaacgatcctcccctgttcaggctggtgtccgccttttatgatgacatgctttgcaccaagcttgcaaaggcgttcggccgcttttttccggtcctcaaacgtgcggatttccattcccgtcaatacctcagcttccggaacattcggcgtcaccgcatagctgcgcggaattaacagctcttttaacgcggcctgagattcctcacgcagcagggaagcgcctcctttggcaatcatgacggggtcggtgatgacatgatcaagcccgtactgatccgttttttccgcaatttccgcaatcatttccgcgctccacagcattcccgtttttacagcgtcaggccgcaaatcttccgccaccgcgtcaatctggctgcccagcgcttcccgggtgagcggataaatgccgtgaacgcccaaagtgttctgggcggttaccgctgtaatggctgacatcccgaaaacgccgagctcctgaaaggttttgagatccgcctgtataccggcgccgcctcctgaatctgatccggcaatcgtcaatgctttgcatatgctcatgatgtttttctctcctttcgcattatccgatccatttatgataaaaggatttcgctctgctgatatcacttgtgccgtgtattaatgctctgccgtcacgaaacagtaccatcttgaaattgtctttgcaaaacgaaattaaatacgggttggctgaaacatcaagccctgtccgtctgagctgtcccgcaagtttttgcagatcaaactgttcagagatccccgctctgatctgcaccgtgttccgcccgcacagaaccgccgcttttgtctgattttcataggataaaaacggataatcgttcgtgccgcagcttgggcaatcagccgacttaagacgggtgacgtttatttctgaccgttcatttttccataaatcaaaagaacggagaacatgctcgatagatccgcccgttaacagcttcagcgcatctgctgcctgaaaaacggccgtctgcaatacagccgggctgatgattcccgccgtatcgcatgtcataccgcctaaaggcaatgtctcaagcagacagtgaaggcacggcgtgacaccgggaatgacggtaaaagagagcccgtagctgccgacacaggcgccgtacagaaagggaatccctttctgtacagccgcatcattcacaatcagcctcgtttcaaagttgtcggcggcatccacgatgagggaggcgtcacgaatcaatccgggtgcgttttccgcagtgacatccatgacaaatccctcgacctctacatcactatttatggatcgaagccgtttttcagccgccgcggctttcggcatttcctctctgacatcgtcttcggtatagagctgctggcgctggagattactccactccacataatctctgtcagcgatcgttaccttcccgacccctgctctgacaagcatctccgcacttgccgtcccaagcgcacccgcgccgataatcacggcatgagacgaccggagcttctcttggccggagggaccgatcggctgaaacagctcctgtctggaatatctgtccgtcataccggaagaccgtctcgcggactgcttgcagttccgtaatctttcaccggaattctccccgcttcataagaaaggcggcccgcttctacggcaagcttcatcgcccgggccatcttgaccggatcatcagcgcctgacacagcggtatttaacagcacaccgtcagccccgagctccatcgcgtaggcggcgtcttttgaagatccgacgccggcatcgacaatgaccggcaccttcgcctgttcaatgataaaggatagattcagcggatttaaaattccctgaccggaaccgatcggcgaagcacccggcataatagcatgcaccccgagctcctcaagacgtcttgcgagcacgacatcatctgacgtatacggaagcacgataaacccctctttgagcagctgttctgatgctttcagcgtttcaaccggatctggcaaaagtgaccggctgcatccgatgacttctacttttatcatgtcacaaagccctgaagctttggcaagccttgcgattcggactgcctcttcagccgttgcggcgccggccgtattcggcagaagcgtgtatttagacaaatcaagctgttcgagaaagttaggctgagactcttcaaagatgttcatccgccttaccgcaaaggttaaaatatctgattccgagacggccaccgcctctttctgaatctcaaaactcggatattttcccgttcctaacagcaatcttgactgaaactgttttccgcctattgttaacatcctcatccgcctcctacaaaatggacaatttctatgacatcgcggtcacacaaactcgtattttcataattctttttttcaatgatttctttatttctctccacaactacgattctttgatcaagctggtacgattcaagcaaatcctgaaccgtcccctcttttcgattccaatcaatttgttttccgttcagctgaaggatcatatatgaacagcctccttgcgatcgattcgaaacgcttcttcccattcctgtttaatctgtctttccatgatcataccccgcaccatttcagccgttgccggcgccaacaggatgccgttccgaaaatggccggcggcgaagatgatgccgctgtcttcaggatgccgcccgataaacggctttccgtctcttgttcccggcctgagccccgcccaaaaccggtctattttcatatgttcgacggcgggaagcatggttttcgcttttgcaatgacggcctcaattcctccgatgtcaggcgtatcgctccagtcgccgtgtttcatcgtggcgccgatgacaagccggccgctttttctcgggacgacataacaatgatcatggtaaagggttttggtcagcgggatatcgtcattccacacggaaaggcattctccttttacaggaaaaaaaggctgtcccaagccgagctggctgaaaaaccggccgctccatacaccgcttgcaactgcgactttgtcagcatagacatccccgccggacgttgcgatgcaatattctccgttcactcgttttacggaggtgacttgtgtatgctcatatatgtcagcgccatagcgccgcgccccttttgcatacgctttgcaaacatagtacggttcgacatggacatcgtcttttataaaacttgcgcctagaatgtcttttgaagcgtaaggctctttttcaagggcatcttccgctgaaagccaggtgacggaaggtagatcatccatcttccgcagacgggcgatatcttcttcggtatacgccagtttaagcattccgccgttatggcgcctgatgtcaatgccgcaagcttcctcaagctcttgccccgccgcttcatacagcctttgactgtgcatggcaaaatcaaaaaacgcatcccggttttcacattccgcatgagcgcccagcattcccgcggcagcgcttgtcgtttttcggccgacttctccggcttcaaacaagacaacgttttgctgcgtcttcgccagctcataagaaatggcgcacccgataattccgccgccgatcaccgccgtatcatagtgcttcttcataatcggcctcccttaccgcgcgtgcataccgttttgccgcctcctcaggattttcagctgagaaaatgcctgacatgacggcaattccgtccggcttcgcctgctttgtgtgtccgatcgtctgcagtgtcattccgccgattgcgataacggggatggaaagcgtgcgtttgatctctgaaagcaggctgatgcctcttgcttcaagtccttgtttacattcggtttcaaatacatggccgaacaccacataatccgcatcttccttttcagcttggatggcttctttcagcgaatgaaccgaacgtccgatatgaagatggggaaatctgcttcgcacctgctttacggaaaagctgcgggacggaagctgaacacggtgtatattggcaaaaagcgcgatatccgccctgtcattgatgatcaatttgtccttatccgcaccgccctttttcaaaagggacaaaagctgcatgatctctcccgctgttttatcccgctcacggatatggataaagcttacttcgcgctgaatcgaaagaatatcctcagccagctcggcaacgggtttgcgattatcagttaccgcgtgcagctccaaaggattccacctcttttccgcccttctcggaccagccttctttttgataagccattccccaaaattgatattcataatagcttgaaatcacaaaattctctttcattttcgcgcggatttcctctgtgctgttttcagcaatctcgtcaaaacggctgatctgttcttcgacttgctgtctgaaccagtctccgccgtatgtaccgatccatttttcataaatcggatgctccggtttgcactcctttaagtgttcgccgacttcataataaagccaataacagggcagaagcgcagctaatatttctccaaaattgccgctcatcaccgatctgtacatatgagacgtataagaataggcggtcggtgccggtttaaatgccgcacgctcttcttccgtaatccctaaaagctccgtaaactcgcggtgcagcgccatttccgcttcatatgtcccttgagcgtggcccgccatcctgcccgtcgtaaacaagtcttcggcatatgcggcgccgaacgcctgaacttttgcaaaatgcgtcaaatagtaggaatcttgcagcacgtaatagctgaaacggtctatcggcaggcttccgtcaccgattcccgttacaaacggatgaacaaaacttccgtcccaccattcggcagccgccagtctgcattcttcagaaaatgtcatcatgtcttcccccctgataaaataaaaaaaccactttcccgcatcggaaaagtggtttggaatttaaatggataaaaggaacccccaaaaaataccgctccacttccctacgcaggtctgaacctgttcaagttatgagggtctaaaagtctcacttttatctcagcccttatgaaggacacccctagtggtcatacgattaatgatttatttgttatgccttctatattatcacgaattgcaatttggtcaagcttcaaggatttttctcagttccgacacgtagttgcgcgagcccgtgacgatgagacggtctcctgttttcagcctcgtgtctccgtgcggaacgatgctgtccacacctctgaaaatccggacgaaaatgacatcgcccatcagcggaaattcccgcagaatgatgccgttatacgccgggttttccagattgatctgatataacgaagactcctcattcgtcaggaggctcatcacgcccggcgcctcaattaatgcgcgcaagagcgtctttgtagacagaaggatagaaaaaatactgatgccctcttctttcagttttgtttcatgctcaaccgagccgacgcttgcgatgatacgctcagtccctttctctttcgctattaaggcgatttcggcgttcacatcttcatttcccgtcgccacgacaagaatatccgttttgaaaataccgtgcgactcaagcgtgcctggctcgtaatcagaaatcgtgtcaaccgaaaaaacggattccgcaagcgtttccccggcattttcctgatacacatggacgacccgtacttcatattcctcatcgggcaattccagcgtaaccggaagtgtcatttggttggcgccgataaatgtaatgcgctttttttcctgcggcgcactttgccgtttgtataatttcttaaagccgatcggcgtgatgatgctggcaataaccgcaactaaagtcagcgcgccggacatattggcgctgataatgtggagcctttctccgatcgtagccgccgcgataacaagagacagcgtggacgtcagcaaaaagcccgaagcaaacacggttcttttgtcataccatttctttaaataaaacaccggaaacattttgctgataaacagcgcaagcagaagcagcggaatcatcgttaatgttttcggatcttggaaaagcgtccaaatgtccaatttcaccccgaccatgacgaaaaagatcggaattaaaaacccgtagccgaaggaatccagctgttccaccatttctttattcggagacagaagcgataccagaacgcctgccaaaaacgcgccgagaatattttccgccccgagagattccgataaagcgacaagcacgataatcagtgtgaaaatggctctcgtgccgatctgcacggtgcctttagacatcgactgcacaaatgaacggtgtttaaagatcctgccgaagaaatacagcacgacccccgcggcaaagagaatcaacagaagccacatatttccgctgtcttctccgtaaagagaagagaagaaagcgagcagaatcatcgtagccaagtccgcgataacggcgacaagcaggatgatctggccgatattggagttcataatccgttcttcctttaaagtcgggaccaccacaccgagtgatatcgtcgaaataataagcgtcattaaaaatgcgttttgaataaaaccggctaatacaaaggcataggacagcagcaatgataaaataaagatgccgaaaaagataatcagtgcggcagaaaacgtgttgggcgcttccttgccattcggaaggaattgttttttcttccctttctcaaatgaagaaaaatcaatttccaagccgcttaaaaacattaaaaagataaagccgagaacagacagcgtctccagccacgtgtctccctgaacgacaagattcaggccgctttttccgataataagccccatgatgatctccgcgacgacgacggggatgctgagcttaaaccgatgtaaaaggagcggcgtcaaaaaagcgacgatcagaacgacgactaaagatgcgactgatgtgtgttccattcgtaaatacctccttaaaacaagggttataaaagcccgcttaaagcgggcgaaaccttacttttttttaaaaacataacgcatattctaacaaggctgaacgcgaaaaaaaagtgataaggctttatttctttaattctttttttaatttgtgcaaaaacagcgtaattaggtataggaattagccccataataaataaaaaaacgttaataaggaggcagacacgaatggcttatgacatcatcagcgatatacacggatgttatgacgaaatgatcgcgttaatgcaaaagctcggatatgaagtcaaagacggaacgcccgttcactctgaaggcaggacgcttgtctttgcgggggatttaacggacagaggcccaaaatccgtagaagtgatgcgttttgtggcaaaagcatatgaaaaaggagccgtccgttatgtcccgggaaatcattgcaacaaactgtaccgttacttaaaaggaaaccccgtaaaagtgatgcacggactggaaacgacggcagccgaactgaaagagctgtctccagccgacagaacggaagtctccagacaattcatccgcttatatgagtcagcgccgctttatgacattttacataatggcgatctcgttgtcgcccacgccggcataaaagctgacgatatcggtaaatactcgcgtaaggtaaaagaatttgttctgtacggcgatatcacaggtgaaacgtatcccgacggcagacccgtcagaagagactgggccgccgcttatgaaggcaaggcatggattgtttacggccataccccggtaaaacgcccacggatcgtcaaccgtacaatcaacattgatacaggatgcgtcttcggcaatcaactgacaggctttcgctttccggagcatgaaaccgtctctgtggaaagctcaatgccctatgatgcctcacgatttcgcgaggatcacggaaggcaggcatgaaaaaaagcccgaaaccggcaaacggttcgggctttacatgtgttcaattaatgttttcatatcgtcaggcaccggagcgtgaaaaacgagcgtttttccggtcatggggtgtacgaatgaaagccgctcactgtgaagagcctgccgggcaattccctcattttttccgccgtacagtgtatcaccgactaacgggtggccgaggtagctcatatgcacccggatttgatgcgtccgccccgtttccagccgcagggctgcaagcgtaaacgcatgtcccgctttttccgtttgaaaatgcgtcaccgctcgttgtccctccggcgttaccatccgctcaataatactgtcgtgttttcttccgatgggcgcgtccaccgttccttccttctgcagcatgatcccgtgtacgacagcgagataccgcctgctgacaagcccctttttctgcgctgccgacaaaagagaatgggaaagccgatgtttggcgatcagcatcgcccccgatgtatccctgtcaaggcgggtgacaagatgaaccgttgattgtacgccgctttttcggtagtggctgatcactccgttagcgatgctttccgacgggtgttctcttgatggaattgaggagacatacggctgtttattgaccacaagcacatggtcatcttcataaagaatatcaagaggaaccggctcaggcaaaagcgtttcactcacatgctccttcggaaattcaatcttaagcacgtctccttccgctaacacggcgcggacggttacatgctctccgttcacaagcaggtctcccccgccgaatttaatgtcagcgagaagccgctttgaaatgccgagctgcgccgtatattcttttaccgtcatgccggcttcccgggcagtcatgttcttttggataaaaaagttgtccaatccgtttcctctttctattcgccttttccgataaaggagtcctgcacccttttccaaaacggaaaaggacggaatcttgcaaatctgactttttcatttgccacacggcatagaatggacttgacatccttatgcagcaaggttaaatgatcaattgtgacttgaaagtcgacgtcgtttctcggtttgatgacacagttatgatgatcgggaagcaaaagcggcgagccgacagtcctgaacactctgttgttgatggatgccatttccgcaagctgaatcgctctgatggaagggtggatgatcgcgccgcctaacgccttattataagccgtgcttccggaaggcgtggacagacataaaccgtctcccctgaacgtttcaaacagctggcctttaatttccacgtcagcgacgagactgccttctatgcttttgatcgtacattcgttcaaagccagataccgctcctcacgctcttcatcatgataagtgacaatcacctcaagaaggggatactccacggtatgatacggcgttttggcgatggccagaacgagcttttctatctcctgcggaacccaatcggcataaaaacccaaatgccccgtgtgaactccgacaaacgccgttttatcgagacggtcgctgtacctgtgaaatgcgtaaagaagcgttccgtcaccgccgacggaaatcacgatttccggctctttttcatccaaggtcatatcaaaatcgagtaaatacgcctgtattttgcttttcaatgtatctgaaacctcgtctccttttgaagaaacggcaaatttcatgccattcccctcctttcctactggtggtctcccgcttttttctttcgcgagaacgcggcttgggcttcctggatttctccgcggatttctgacatttcttcatcgagccgggatgcggcttctgaggcccgctgcagcctcagctttactttttcgggaatgttcccgctgtatttgtaattcagtgaatgctcaatggttgcccaaaagttcatggcaagcgtccgaatctgtatttccacaagaacgtgcttttcaccggacgttgtttgtaaaggatataaaacgacaaggtggtaagaccgatatccgctttccttatgctctgctatgtaatcccgcttatcgacaacggtaaaatcttttctggcaaacagcatatttttgacgatctggatatcatcgacaaattggcacatgatacgcagccccgcgatatcctgcatcgtttcaatctgatgaagcggtatgctttttcgtctcgctttttcaagaatgctcgccaccggcttcacgcggcctgtcacaaactcaatcggtgagtggtcatcttcatactcataaagggttctgacgcctttcagcttcacctttaattcttcaacagcctggcggtatggcgctagaaattgctcccattgtttgtcatccatcgtacatcccccaattccgaacctgttctaaagaaatacgtttttcactttttcttccatatctccgtagtttgcattatctttaatattttcaagaagataatcgagttcttcatgcagccctgaaagttcaaccgtttttccgccggcctcaaggaccgccggttttctttggtctaaggcttctttcagatccggccagacatgttcttttataatgacatattcaaaagagtcagctgattcaagtatgtatacaaaagcaaagtgatcggaatcaacaagcatttgacctgaggctttgcgttccgctccgcttaagtcctctccgcacttcaagcggagcgcgtcttctgttaatgatgcattttggatttcaattctcttttgcataatgttctccttttttaacaaagtacagcatttattttatcatatcaaggtcgatattgataaacgtaacctctaaagagataatgggaattatacaatttttcgtcctgaaaggaagactgtcatgacccaagaaatagaaattgaattcaaaaacctgctgacaaaatcagaatttctgaagctgagtgaagcactctgcatgaaagaacatgattttaaacagcaggtcaatcattatttcgacacgaaagatttttccctgaaacaaaaaaaatcagcactccgcatccgagaaaaagacggcgcgttcgttctgacgttaaaagagcctgccgcggtcggtctgctggaaacccaccaagagcttgcggcatttgatcttgacgtcttcaagattccggaaggccccgtcaaacgtcagctggaaggtctcggaatcaactcagaacacatttgctatttcgggacgctgtcgaccgcacgcgcggaaaaagaatcagaaaaaggcttaatcattttagatcacagccgatatttagagaaagaagactttgaattggaattcgaagctgctgactgggatgaaggaaaacgggcgtttgaacaattgctcaagcaattcggcatcccagagcggatcacgaaaaataaaatccagcgtttttatgaacagaaacaaaaaaaggtggaatgacacagtgaatatcacgaattgggcggcccttctccagctgcaatcaatggcgctgcaatcaatctctcatacaagcacggcttcaggcggacaatcttcagaaagcccgcttgcaaatttcagcgcgcttctcagccagtatacggacacagccgtccggcagcagccggaatcaggaattttaaacggtgtgcggaccgctcacgcttcatattcaccgagaattcccgtttcatccggctccgcggctgcttcacagaccgcttccccgggcataaagtctccggatgcggcttctgatatcagcaccggaaacttttcaatagacagcgccattcagaaagcggccgaaaaatacggagtggacgaaaagctgatccgcgcggttattaaacaggaatcaggctttaatccgaaagcggtcagcggtgcgggggcaatgggactgatgcagctcatgccttccacggcagaatcactcggggtgtcaaacccgcttgatcccgtccagaacgctgagggcggcacaaagtacttaaagcagatgctcacgaaatacgacggaaatgtatctttggcgttagccgcctacaacgcaggccccggcaacgtagatcggtacggaggcattccgccgtttaaggaaacacagcaatatgtcaaaaacataaccaaacagtattacgcgtaaaccagagaggcttccttcgccctctggtttttttgcggagtgaaatcttacacatgaatgaaggcgatgtgatatgatatgaaatacaagcgcctgacagaaaggcactttgtttgtagaaataaaatgttattgctaaaatatacagtaactgaagatagtaaaactgaaagataaattcgcaatgggaattatgattcctattagccatataaaggagtagtcaacatgggacaatcgtttaacgcaccatatgaagcgattggagaggaacttctatcgcaacttgttgatactttttatgagcgtgtctcgtctcatcccttgctgaagccgatatttccaagtgatttgactgaaacggccagaaaacaaaagcaatttttaacccagtatttgggcggacctcctctttatactgaagagcacggacatcccatgctcagggcaaggcatctcccctttccgattacggacgagagggctgatgcgtggctaagctgtatgagcaaagcgatggatcaggtcgggctggagggcgatattcgtgaatttctgtacgggcgtctggaactgacggccaggcatatggtaaaccagtcagaagcggaggatcgatcatattgacgaattatcagcatgagcaatacttcgcccattgccacggacatccaaaaaaaccgctcgaaatttacatgtttgtcgaccctttatgtcctgaatgctggtcgctggagcccgtcataaaaaaattaaaaatcaaatacggacgtttttttacgctgcggatcattgtttccgcgagtattacatcgctgaataagcaaaagcggaaaaaacaccttcttgccgaagcttgggaaaaaattgcgaaccgttccgggatgccctgtgacggaagcctttggcttgagcaggatcagcctctttcatcgccctaccttgccgcacttgctttaaaagcggccgaactgcagggaagaaaagcgggcattctgtttctccgcagcatgcaggaaagcctgtttgtttccaagcagaatattacggatgaagacgttcttttagagattgccgaaaagacgaaattggatgttgaagaattcaagcgcgacctccattcgcaaagcgcggtaaaagcgcttcagtgcgatatgaaaatcgcggcggaaatggacgtcaccgtcaacccgacattgacgttctttaacagcctgcatgatgatgaagggctgaaggttcccggcaactattcttatgacgtatacgaagagatcttattcgaaatgctcggggatgaaccgaagccttctgaaacgccgcctttggaatgtttcattgaatatttccggtttgtcgcatcgaaagaaatcgcactcgtttatgatttgagtctagaagaagttgaaaaagaaatgaaaaaactggcattcgccaaaaaggtcgccagagtggaagcaaagcacggtctgttttggaagtctctggccggcacccaggaggatgtcacctgttgtgatcattaaaaaaagctgattccttacggagccggctttttttgtgcaaataaagaaaccgcgccgggataagcgcggtttcatatgtcttaacgacaacaaaggggatgggagaaatttttcacggtcaaacaaaggggtaatgtttgtttgtgatcaatttcacatccttatcatatcaaatcttgtcgagttttgacaagccataagattaatgttcatatttttgtcacaaaacataactgactgcttgttttcatagaatatatcaatcataaacaaggagggaaatcaatgctccgcaccgtattgatcatcggaatgattgtgtttttcttctttttaaacctgctggccatgatgcacatgctgccgatttacattacatctcccctgctgtttctgtccatattatttgccctgtatcggctgaatcacagaaaaacgtttaaagggttttaaaaaaagcctgcgcatcttatgcacaggcttttttgaactacgaagggttcactttcgaaagaagctcttccatctcgttcagtttctcttcaaacattttgcaggccgcctcgatcggttcaggcgatgtcatatcgactcccgcttttttcagtatgtcgatcggatattccgagcttcccgcttttaagaattcggtatagcgctccaccgcaggcttgccttcttttaagatctggctgctcagcgcttgggccgcactgtagcctgtcgcatattgatacacataataattgtaatagaaatgcggaattcttgaccattccagactgatttctttatcaatcaccatgttgtcaccgaaatactttttattcagatcataataaagttcgttcagcagttcaggcgttagcggctcgccttcctgtgctttcgtatgaatcagatgctcaaattcagcgaacatcgtctgtctgaacactgtgcctctgaatccttcaagcatatggttgagcaggtacagacgctgtttttcatcctttaagctgttcagcatatattcaccgagcagcgcttcattagtcgttgaagcaacttcagcgacaaaaatgctgtagttaccgtacggatacggctgatattttctcgtatagtaactgtgcacggaatggccgaactcgtgaacgagcgtaaacagattattgacattgtcatgccagttcatcaagatgtacggattcgtgccgtatgtaccggacgaataagcaccgctgcgttttcctttattttcgtatatatcgacccagcggttttcaagtccttcttttaaaatagacgcgtattcctcgcccagcggagcaagtcctttgagcatataatctttcgcttcctcatatgtgaccttcattcccgaatcttttacgagcggtgtgtaaaggtcataaatatggacttcatcaaggccgagaacctttttccgcaggtcaatgtaacggtgtaataacggaagatgtttattgatcgttttaataaggttatcgtaaacttcttcagggatgctgttattggataaagccgcttcccgtgctgatttatattttttcacacgggcgtaaaaattatcttttttcacagtgccgctgagtgtagtcgccatcgtgtttttatactgtccgtatgttttatatacggcttcaaatgcgtttttgcggacttcacgattgctgctttccaggaaattaataaagttgccgtgtgtgatttgagtttccttgccgttttcatctttaattgacggaaacgtaatatcggcgttatttaaaacactgaatgtattggaaggcgacgacagcgcttctgaggcttccgcaagcagggcctcttcttgttcgctcagcacgtgcggacgctgttttgtaatttcttcaattgcatgggagtaaagtttaagctcctctttttccagaataaactggtgcagcttgtcctcctgaatcgccagaatttccggttcaatgtaagcagtcgcgctggcagcctgggaatacaggcttgcggctttgtcgttcagcccttggtagaaagaatttcccgtatcctggtctgagcgcatatgcgcgtatgcataaagtttcccaaggcggttcgtcacttcatcctgtgccgtaagcgccgcgtataaattatcagccgaatgagcaagcgtgcctttaaaagaagataaattcgggattaattctttaactgcttgaaattctttattccaggcctcatcactaggaaaaatatcctctagtctccatgtatgctctgcctttacttcacttctgtcaggcagctgtgctgctttattttcctcagtcatggtgatccccctcgttttctttacttcaagccaattgaaaaaacgattgtttctccaaaaacttgtgttgtgattatcttccggcttttcactgccttttgtcaaatcatatgcggcatataagaccgagcataccaataatacagtgaaaaaacgaaaacaaactgcttgtacgcccctcacattcgccaccaccttgacgttagggtgaacgaaatgaagcattctcattccccaaaaaagagcagatcccgccggcgcagctcttctgccgtttgagggagcttccgttgagatgagggcatatatacttcattctcaatttcccttaaaaaatcctgcaagcataagaaatcagcatattgttttaccgccattctgataaggctatcttgtgaaccataccgcatccgaatctccttacgcctgattttttgccgcaaatcatgaaccatgccggataatcggatcggcgtgccttttttagaaagttccgcaagccgcaagtataaatggctctgccacacaaaaacgggactggcaaacacaaagcccgctgaaacgggaataaacacttcagatgggagaaatggaaatgcaacctgatgtctttcgtaaaaaagacgccggataagaccggcatcttcagataaaaaccggccgcttttgtttcggaagccggctacggcacgtccccacgagggaagtctgacgctgtgcctcccttccggatgacaaatgtctttcaggtttgctttgtgaagagggattgtaattaagccggcataagaatagccggtgtaaaacggagtgatggaatgcagcctgtaaaaggagcgggcgtcggggcagtaaaacagtaaggaggaaaatgaatggacttcaaagaactgccagtgaaaagcagaaagccggaaaaattgcgcggccatccgttttaaccgttttgccccgatgatccagaccggccggtacccggcgtttttcaggcctgccgtccggctctttaaagagtccgccgaaaggttcgcacattgaaattcaaaagccagcttctcttctccgctttccgcggtcaagtcaggccgctgtccagcggaagtcagatacggttccaggctgacgctgcacccttgtgtctttagccagagaaaaagctgtctttttccttccagatggtattcgctttcaggttcggattcccccggacacagcctgctttttttatgagcgaagtgcggcagtttctcccgtcccagtttgatatcaagttcactttcgcaaacggggcagaaccagcgtttctttctcagctccgccgctttttcctttgaatagcttccggccagctgaatgagccgtccgtcggcagtcacagcactgaacatgttgcatcttctcctttcctgaatcttgttgtattcagcaggaagaagatataatcctgtttgcggatgagagccgttatgcggttttcagccgttcatcctgtcattcagaacaaaaaaaaccgatttctgctgagagaaatcggtttgttatgatgcaaagtgtttttttattgtatataacgcatgatcagcgatcaccaatttgccgtattcttcaagacggtgaatgctgactgatgattcgtgcgcgtactccaacaggatgcttagctgattttcaacctcttcatcagtttgctcataaaaatctgcatataaataatatcggtcttcaaacgaatacagggtcgttttgattccgttaagattcaattttgatagcgagatgagatcctcaaaatcatcgaaccgcaaagtgaactgaagcttttgctccttatcttcccggctctcggcctgctcttctttctggaaatcatcaagtaaagcatcgagattttcatctgccggctcttgttttttatcttccgggatcggcagttcgagtttttgtccgtccttggaaagctgggcttttgttacgattatttccagtcctttgtccaatgcctgaacctgaatccaaagaggaccctcgacagcgaattcctcttcatcatgcacttcatccatgacttcccagaacagttcttcactgcgctcgcgattgtaccagatttcttctctgtcaaaaccgcgatcttcaatatcaccataagacatataaaattttacagtatgctcattaattctttctatttccattttgccaaccttcccttctttataagatgttgaagggacatctaagctcccgatgaatagtactttactacactttacccattccgtccacatcttaaccttatagaagacagcgcaaattctttatatttctattttatgataaaacaggtataaaagaaataaaaaagcattttcacaccgaaaaacaggctttctcccggttcccatcataaatagcgcaccgcttcatatattagctgtacaagcaatcgatctataagcgaggtgttaccatgccgcacgattacctgctgtcccttctgctcattatcggaattgaccttattctcggcggtgacaatgccgtcgtcatcgcgatggccagccggaatctggcccataaacaaagacagcaagcgatcatcttcggaacgtttatcgcagtcgtcttgagaatcgttctgacgagcgctgcggtctatttattgaatgttccttttttacaatgcgcaggcggggtatttttattgtatctcggctatcagcttctgattgagaagaaagatgcgcagcatgtgaaaagcagttcttctctttggaaagccatccgcacaatcgttatggctgatatctttatgtcgcttgacaatgtcatcgcagtagccggcgcttctcacggtgagctgacacttgtagtgatcggtctcttcatctcggtgccgattatcatttggggcagcaagctcgttcatgccgccatggacaaaatgcctttattgatgtacgccgggagcggtcttctcgcatttaccggcggtgaaatgattgccggagacagcaagctgtcatttttcatggcagaacacggcattatacaaatgacgctgccgattttgaccgtcgtatttgttatcctcgccagtatgatttaccagcagactgaaaaataacaaaaagcccaaaccgcgatggttttgggctttttccatgcttatcgtaagcttatatcagttggcaagacgctgtgcttctcttaattggaaagaacgcacttttcttggcaggaatcgtctgatttcatcttcgttatagccgacttgcagacgtttttcatcaatgatgatcggacggcggagcagtcccggatgctcattgatcaaagtatataagtcttgaagcggcatagattcaacatttacgttcagtttctggaatactttagaacgggtagagataatttcatccgtaccgtcttcagtcatacgcagaatctgcttgatctcatcaattgataacggctcggagaaaatgtttctctctacaaacggaatctcgtgctcttcaagccaagctcttgcttttctgcatgacgtacagctaggtgatgtgtataatgtaaccattaatcttcactcctctaattagtaggatgaacatgtttgtattctcaaattgaaatgactttaaaaaaggaatctttataggtattatactataaaaaagtaagtgtgaacagtctcctgagaaaaaaatgtgtcaatccggcaaatttacggctggcggatgtttccccattctcaattagctcagctgatcgaaaatgttttttcgttttttctcatcaatgactttgagaacttcatccgttttttcgtatgattctccgtaccatttttcatctttataagtgtgaatgttttcatatgtctgtttcatcgcttcaaacatttcttcttctgattccgtcttaggtgaccagtacagaatctccattttgttcacttcattcgtagccaatgaccggcgccgatacccgattgactgcgcgtgcttgaaatgctctctttgataaaaacgcaagcgtttctgtgtatccgtgtcatcctcgtcaacaggctccacctcaagcagaatcggcttgtttttctttttcagcctgccgatcagcttgcttccgaggccttgtcctctggatttctttgacacaaacaggtaatcaataaagatgaaagagtcaaattccgcatacatcagcacgtggtactgcccctcttctttatgataaacatcgctttgctcctttaacagagcttccatatgcgcttttgatttcatttcttcaatcggaaaatattcactcagcttttcgtaccagttcattcatttgctccttatgggttcgttgtcttcacacttttagatataccccatttccgattgtttaaacaatcttacatctattaagacgtgtgatcctttaacatggtttcaatttttttaaaatggtgtgtaatcgacgtttttggtatagcggtttgccgcgtcccacaataaaaattcgtcaattccttcatcatgcagcgctttaacctggtcttccacctggcgttttccgtacttttgataatttccgctgccgagatatgatgccgtgaagtcctgaagccacggacgcgatacaggctggtgtttcagcttagacagttttttattttccacctttgcgtattctttgacgactttgtaaggctcaagatccggtttatcaatgccgaaatagcttgtccaatggctcgggtaaatcatggatgaaatgacatcgacctgttctgaaattttgctgaaattctggccgatcccaggcgcttccggcagcgtggctgaatagccgaaaatatcaaccgacacatccgcggcgtacggcttgagttttttcttcgcataaccgacaaaatcggtgacggcgtgaacgcgtttttgcacattgctgtctgctgtttttccgtaatcgccgtgtccgtatgtcagttcgtcatcacgtttttcaaatccttcaggaaaacggacataatcaaactgaatttcttgaaaacccatctttacggcttgttttgcaatctttacattgtaatcccatacttctttcataaacggattgacgaacgattcgccgcggccgtttttccagacacttccgtttttttctttaaaagaccactccggctttttgttcgcgagttcgctgtctttaaatacgacaatacgcgcgatcggatagatctttttttcctccagctttttcatcatcttttttgggtctttgatgtacggcttggcgattttggcatactcagaatggccgtccggcttaaaggtgaggtttccgttgtcatccttgacatcaatcaccattgtattgagctccgttttgtccacaaagtctgtcagctccccgaatttgcttcctcccgctgaatgccctgtgacgtaaatgccccgcaccttatcaggatgtgaaaaatgcagccctgacggataagcgaaccgtgcatttgatttcggcagttctttttcggccagcgctatttttacaagcggctgctcctctttcgcagcggcgtgggccggataagcggctgcactgataaacagtcccgcacaaatggcgcacaaaatggttttcatactgatctccccctttttttccattatagaaaaacgggagcaggcttaataaacttgaatgtgcgcaaaaaaatcctccaagactgagtcttggaggatgatacgtttatagataggttttaaattcagcttctgtgcacatgacaaaatgtcccggtttcacttctctgaattccattttttctccgtcttgcagctgatgaactgccggatcgtatttctttcgcgtgcgatttctttcatagtccggatcagggagcgggatagcggacagcaatgatttcgtgtatgggtgaagcgggttttcgtaaagctcatccgccggcgcaagctccaccaattttccgaaatacatgacgccgatgcggtcgctgatgtatttgaccattgataaatcatgggcgataaacaggtaagtgagccctttttctttctgcaattctttcattaaattgacgacttgcgcctgaatggagacatcaagcgccgaaatcggttcgtccgcgatgataaactccggatcaaccgccagcgctctggcgattccgatacgctggcgctgtccgcccgaaaattcatgcgggtagcggttggcgtgctctttatttaaaccgaccgtttccagcagttcgtgaacccgctgcatccgctcttttttcgtttttgccaggcggtgaatatctattccctcggcaataatgtcggcgactgtcattctcggatttaaagatgcgtacggatcctggaaaatcatctgcattttccggttaaactccagcagcttcttgcgggattttttcccgtgcacattttccccgttaaagagaacttccccgccggttgcctcatacagccggataatgctgcggcccgtcgttgatttaccgcagcccgattctccgacaaggccgagcgtttcgcctttataaatatcaaatgacaaatcatctacggcttttaccgttcctttctgcgtgaaaaaatgctgttttaagtgtttaatttcgagaagtttctcagtcatttttttcaccttccttcattaaaacaggatgctgatacgtattcggaagctgacggattttagccttcaccgcttcaggcggctcgaccttaggcgcatcaggatgcagaagccacgatttcacgaaatgcgtatcagacactttatacatcggcggttcctgttcaaagtcaattttcatcgcatatgagctgcggagcgcaaatgcatcccctttcggagggttcgtcagatcaggcggcgtgcccgggatggccgtcagtttttcctgatcggtgctgtccaggctaggcattgaggcaagcagtccccacgtatatggatggcgcggatcataaaagatttcatccaccgtgcccgattcgacgacctgacccgcgtacatgacagcgacccggtcggcgacattggcgacaacgccgagatcatgcgtgataaaaatgatagacgtatcaattttcttttgcagatctttcatcagctcaaggatctgtgcctgaatcgtcacatcaagagctgttgtcggttcatcggcaattaacagtttcggatttgccgcaagcgccatcgcgatgacgacacgctgtctcatcccgcctgaaaattcatgggggaattggccgatccgtttttcgggcatcggaattccgacgagatcaagcagctctatggcgcgctttttcgccgcttcacttgagattttttcatgtttgaaaagcacttccgtaatttgtttgccgactctcatcgtcgggttcagagaggtcatcggatcttggaaaatcattccgatatcctttcctctgatggcctgcatttctttttcagacatcggcacgatatcgcgtccgtcaaaaagaatctgtcctcttttaaagtagcccggcggcatcgggatcagcttcataatcgcttgggaggtcacactttttccggaacccgactctcccacgatcgccagcgtctctcctttattcaaatggaaattcacgccgcggattgcctgtacctctccgccgtatgttttaaatgaaatggctaagtcttttacttctagcaaacgtgtcactcatatcactccttatttgcgtaacttaggatccagcgcgtctcttaacccgtcgccgacaacgttaaagccgaacatcgccaggcagataaagccggcagggaagaacagacgccaagggtaataggttaatgcaggcaatccgtctgaggccatcgttccccagctcgcaagcggcgcaggtacgccaaggcccaaataacttaaaaacgcttctgtaaaaatcgccgtcggaaccgtcagtgtcatcgttacgaggatagagcccatcgcgttcgggacgatatgcttaaacaaaagccggccggttttggcgccgagtgtctgtgaagcaagaacatactcctgattctttaattgcagcacctgtccgcggacgattctcgccatattgatccagcccgttattgtcatggcgacgataatggtgagcaatcctttcggcagaacaaccatcagcaaaataaccattaataatgaaggaacagcccacagaatgtcggcgatgcgcatcatcacttcatctgtgcgtccgccgcggaaaccggaaatgctgccccagattacgccgattaataaatcaagcacggcagctgcgacaccgataaagatagaaatccgcgcgcccacccatgtccggacgaatatatcccttccaaggtcgtccgtgccgaaccaatgatctttcgacggcgctttatccgcatttaatagattggtagtggcataatcataccttgaaaagacaggcgcaaaaatcgccatcagaataataagaacgatcagtacgaacccgaccatcgcaagcttattgctgcggaagcggagcatggcgtctttccagagggaaaggctttttttatttattttttcggcatcgccggcattagctgaagctggttcaaacatatttttaggaatgttctgcatggtctaggctcctttctttgctttggaaagcttgattctcggatcgattaatccgtacagcacgtctacaattaatacgcataaaagcaggagcacgctgaagaacacggtaactcccataatgaccgtataatcacggtttgtaatgctgtttacaaaatgcgcgcctaaaccgggaattccgaaaatggattcaatgatgaaacttcccgttaaaatggatgccgccatcggccccatatatgtcacgaccggcaaaagcgcgtttcgaagcgcatggcgcacggtgactgacggacgggaaagtcctttagcttttgcagtccgtatgtaatcgctgtttaacacttcaatcatgcttgaacgggagagtctggcaatgaacgccatcggcatggaagcgagcgcaatagagggcagaaaggtgtatgcccaggattcccaccctgcgaccgggaacagttctaatttaattgagaaaatatattgcaaaatcgtcgccaatataaagctcggaactgagatcccaaagatcgttaaaatcgcaatggtataatcctgccatttattatggtacagggcagcaagcaccccgaaaagcacgccgaacgctaaagcgaggagaatagcttctgcaccgagagtgaatgagacggggaagcctgaattgattaaatcattaacactttggcctttatatttaaaagaaggtccgaagtcccacatcgccacagattttaagtagctgacatattgaacgaaaagaggcttgtccaggccatagtgttcgtttaagtttgcctcaatttcaggcggcagctttctttcgccggaaaatggtccgcccggcgctgcctgcattaagaagaatgtggcggtcacaatcacaaacagcgtgatgatcatgtaaatgaatcgtttaccgatatatttcagcaaggtgaacacctccatgttttttacaattttatacttaatcagtaagaaaggtatatggggacatcctccccatataccttgggtcttttgttttcagaaccgtcttttattcaaaagaagcgtttctgaagtaaacttcgcctgttcctgtcaagatcacatttttgaggtttttatcctgcacccaaggatccgtatagaaataaactggcgcgaccggcattgcgtcaataaagatcttttctgcttttttcagctcttcgatacgtttatccggatccgtttcaagctgagattggttcagcagctttttaaactcaggatcttcccatccggtatcattgtttccgccttctttatcacggaacaattcaaggaagttgatcggatcgttgaaatcgccgagccagcccatacgcccgatttggtagttctggctgtgcagcttatcgatgtaaacattccattcggagttatcaagctcaactttgacgcccaagttctttttccacatttcctgtacggcctgcgcgattttcgcatgcgcgtcatccgtattgtaggacagtttgatcgccggaaggtcagaggcattcttgacgcctaattccttcagtcctttatttaagaattctttagctgatttgacgtcattgtctttgaaataaccttttgtgttatccttgaatcccttcattgacggcggcaccgcagccatggccgggatctgttcgccctgcgttacattttttacgatggacgagcggtcgatcgcataagcaagggctttacggatgttaacattgttcagcggtttcgcttctgtgttgaatttgtaccaatacacgcctgcgatcggttcaacgtgaagagatccgtcttttttcaaggtcggcagagattcagtcggaagctggccgagcggcattcctgcccagtcaagctcaccggcctggaattttttcagttcggtgttgttattgttaatcatcaccatgttgattttcttcaatttcacagcgtctttatcccaatattgatcgttcttttcgagcgtgatggaaccgctgtgtttccaggccgtcattttgaacggaccgtttgacacataattttcgcccgcgttggtgttccagtttttatgtttttccgcgattttcttgttgatcggcatatacgtatagaatgaagttaattgcgtgaaataaggtgtcgggttattcagttcaacctttaatgttttgtcatttacggcttttacgcctacatcatcaatcttgccttttcctgtattggcagcttcagcgcctttgatatagtagagctgataagcgtattgtgattcgttgttcgggtcaagcgcccatttccatgcatattcaaaatcctgcgccgtcacagggtcgccgttagaccatttcgcaccgtcacgaatcgtaaatgtataggtctttccgtctttgcttgtttcaattttagatgccattccttcttcaggctcacctttggagtttacgcgtgtcaatccttcaaaagtctgtcggattacgcctcctgacacggaatcattcgctaaacccggatgcagtgagaacggctcggttttaatattgatattaagtgaagtctgtcctttggtgtcttttttaccgccgcctgatccgccgctgaatccgccgcacgcacttaatacaagcgagaagataagcatcaaacctacaatagaccaacgctttttcatgcactaaccccctaatcaaatttttcagcctttactactaaatactcagaaatatcagacaaaataacttaatatttttctaaactttaattgtgttccgtcttttctgattattttatgtaaagaagctgtaacaatagagtgaacaagttcattataatgaaatgaataatttattgcaatactattttctcaatttaaaatatttaaatttggtcagtttttctgtcaaaaaggtgatacacttctatagtttaaagcatgacctaactaaatttttttattgtaatttccagttcatattgctttttacatataatattcgttatacgaaatgttgatatgcgttatcatttaagcattttcagttctttttgaggatttccacccctaaagcaaactggaaataagcttgtattcctctgatgacatttggctataattgatttataatagatcaatcaaatacatttgttgtgattgcgatgatgaagagtagtacacattttcatccgtttgaagagagtctgcggtgctgggagcaggtaacgggcgatgtggaatggacttctgagcagctgaccgaacgttagtaggcccagccggagcagcctccgttaccaacgtctcgagcgattccattgtaatggaataatcagggtggcaccacggttcattcgtcccttttttctacgggaagaatgggctttttttattatgttttaagaaatgaggtaagaactatgaagaaaacgattttttctggcattcagccgagcggttccgttaccctcggcaactacatcggcgcaatgaagcaatttgttgatttgcagcatgactacaacggctacttctgtattgtcgatcagcatgcgattacggttccgcaggatcggcttgagctgcggaagaacatccgcaatctcgcggctctttacctggccgtcggacttgatcccgagaaagcgaccctctttatccagtcggaggttcccgctcatgcccaggcggggtggatgctccaatgcgtcgcatatattggcgagcttgagcggatgacgcaatttaaagataagtcaaagggcaaagaagccgtcgtgtcaggactgttaacctatccgccgctgatggccggcgatattttactgtacggaacggatcttgttccggtcggagaagatcaaaaacagcatcttgaactgacccgcaacctggcggaacgctttaataaaaaatacaatgacatcttcacgattcctgaggtgaaaattcctgaatcaggcgcgcgcatcatgtcactggctgatccgctcaaaaaaatgagcaaatcagatccgaaccaaaaggcattcatcacgctgcttgatgaaccgaagcagctcgagaagaaaatcaagagcgccgtgactgattctgaaggcattgtaaagtatgataaagaaaacaaaccgggcgtttctaatcttttgacgatctattctattttaggaaacacatcaattgaagaattagaagctaaatatgaaggcaaagggtacggtgaattcaaaagcgatttagccgaagtcgttatcggcgcattgacaccgatccaagagcgctaccgtgaattaattgagagcgacgaacttgaccgcattctcgacgaaggagcggcacgcgcaaacaaaacggccggcaaaatggtgaagaaaatggaaaacgccatgggtctcggacggaaaagaagataaagaaaagaggcgggagaatccccgcctcttttttagttcacttttgattcctgttccatttcccaaagcttttcgaaaaatggctgccctttaatcaaattttcacagaacgcaagatgtttatctgaccagccttcaattgtttcattgtaaagcatgtcccaaatctcttcaaagctcatccgtttgatctgctcgtacatatgcggattccactccgtgtaccaatacacaatttccgcacggtttttcagccctttcagctggtcgagcgccataaacatcagctgcttgatctgccgctcttttctcgtcagccctctgacgtgctccggcgccaatgacaaaatgtgatattcctttgaagactccaattgcgccggcttaaattgaaacgattccggttctacatcctttaccatttcataaacaagctgctcctgtctcggaatcaggcggctctttctgaccggaatggtatacccgatcgtatccacggcaatgatgccgatcccgtctgtcacgacaaaacaatactccagctttgtccgctcatgattttttcgcacgtatgacttttggtggacttggtcaagcagctctttcggaagctctgataagtcgttttctatgtaatgaaataataccgacggcactctgagcagcggcgtctgatccaaaagttcaaccgtgtcttccttccgccattcgtgaaaatggcatacattgtagccgttttcttccccttcaaaccaattgacccatacatcatgaagaaataacatattcgacccctcactttataaaaactgttgtccacagtataggcaagggatagataaattattccatttcaatatgagatttccgcattacggagctggatttccgactgcatcgcaacaaaaaaatctcccgttccgtccgggagatcatttcacatttttcggatcaagcgcatcacgcagcccgtctccgacaaagttaaagcacaatacggtaagaagaatcaacaaccctgggaataacgggtaccaccaagcctgaatcataagcgtaaagttctgtgcatcctgaagcatattgccccagcttgcgatcggcggctgaatcccgaaaccgagataacttaatgtagattccgccaaaataaccgttcccacctttaatgtggctgagacaataatcggtccgagcgcattcggcaatatatgagaaaagatgatgtgatgattttttgtaccgatcgtctttgcagctaatacaaactctctggaacgaagcgataaaaactcccctcggacaagacgtgccgttgttgtccagcctgtaagggagaaaattaaaattaatttatccattccgggctggaaaatcgtaacaagtgtaataagcaaaaatatatcaggtatggataatacgatatcaacggttctcatgagaacggcatcgacaatccctttaaaatatccggcaacggctccgacaactgtcccgattgtaatcgcgccgatcacagaagcgaatccgacaagcaaggagacgcgcgccccgtacagaaccctcgtaaagatgtctcttccgaatttatcagttcccattagatgttttaagctcggcggcttcaaacgattgataagagattgactctccggagagtaaggagcgattaccgaagcgaataaggctgacaagatgatgatggttaatataacggctccgattacagctagtttattttgaaagaacttttcgaaaaaaatcttcgtcattgtttccggtttggattgaatattttcctttaattttacttcgctggggggtgtgccggtatttggctgtaacatttgacctctcacctctctttgttaatattcaatgcggggatcaaccagcgcatataagatgtccgcaattaaattccccaccacaaccaaaacagctgaaatgaccgtcatggccatgataaccggataatcccgcgaaaaggctgaatcaataaacaatttaccgagacccggccaagtaaaaatctgttctaccactaccgctcccccgataaatgacggtatcatcagaccaaaaatagtgatgacaggaagaagtccgtttctcaaaccgtgtttaaaaattactttattatctcggaatcctttcgcacgcgccgttcgtatataatcctgttttaacacatcaagcatactggatcttgtgtatctcgttatccctgccatgtctgccgtagcgagcacaaaagcaggcagaatcaagtgatgcaatcggtcaaatatgttaaagtcagcattcaaagtgcttactccgccagtgggaaaccaccccagatttacagataaaaccatgattaaaatcaaaccgaaccaaaaattcggaatggcaagccctaaaaatgaagtaacagttatcccgtaatccaattttgaataaggacgtttcgctgacagaacaccaaatggaatagaaataagaagagcgacaagggttgagaaaagcataagcacaatcgtattcggtaagcgggataagataagttcagaaaccggagtgcctttcttgacgatagaagtcccgaaatccccttgcagcatattccccagccatttcacatattgaacaggttccggatcattcaacccgtatttttcaatgaattttgccctgtccgcttgactgattgtagggtccatcataagtgacatcgggtctcccggcgctgctttcatgatggcaaacgacaaaattgtaatgcctaagagaatcggcaaggacattaatgttcgccgtaaaatatatgtaaccatgttcttgtcccctttttaaataggataagagaggaaaggaacctccttccctctccagggcttttgctatttttgatccagccaccatttttcaatattgtacaagtcatttttagggtggaatacataaccttgtaaattattcggcatcgctctgtggtaattgtaatagaataagaagctgtacggctgatcttcagcaatcaatttgtatatctcttcatacttcttttggtattcttttctgtctgtaattgtcttcgcttcttcaagcagcttatcgactttcgggtttttataccagatattattcagcccgtttttcgattggcttgaatggaagatagagaattgatccgggaacgttgcaagactccatccgagaagaagagcgtcataatcccaattaggggcacttgtctgttcgattaacgcactgaattcaacaattcgcggtttagcctcgattcccacttcttttaattgctgctgaacgacaacagctaaatcttcacgaattttattgccttgattcgttttaatttcaaatgagaatttttttccgtctttatcaaggtagccgtcaccgtcatggtcttcccatccggcttcttttagcagctgctttgcttttttcggattataatcaaatgtcggcactttagacttcggataattccatgacagcggactctcaggaacatccgctaccttaccgtctccgttcagcacttgatccaccattgcctgcctgtcaagagcgtaagtcaatgcctgacgcacttttttgtctttaaagatctcttttttctcattccagccgatatagctgtagtttaaaccaaggtcagatttgaccttcacatttccaaacgttttaaccgtatcaaaatctgtgcccggcacaacgaagaaatcaatatcccccgcttttaactgagccacggccgcgttagaatcaggtattgtttttactgtcactgtatcaaggtaaggtctgccgccaaagtaatcatcatttgcttccagtttgacatactcgccctttttccactcaacaaacttaaacggaccggaaccgattggatttttacggttaaattcattctctcccagatctgcaaccgggaccttacccaatatatgtttaggcaaaatgccgtaactgtcgagaacgacattatagaaataggcatcttttttcttcattttaaactgaatttcatattttccttttttcgttacggatttaagggactcaaaacccgagccacgctcaccgttgtaatctttgttaagagggatgctgtaggtgaaaacaacatcatcggccgtcagctcttttccatcatggaatttaacgccttttttcagttttacatcatacgttaatcccccgtcagcttctgttactttttcagccagcgacggcttgacgtttaatttctcatcagtttccaataatgtgctgtaaagcattccttcaatatcagaacttgcaacatcagtagaataaagtggattaaaaagtgtgggttccccggttgacccgacaaccaaatctccgcctttttgcggttttcctgccggtttggattcggtgcttgtggattttgagccggagcaggctgacaggaagatggcaaacgccataaaaacacttagcatcatcagtgcgcttttacgtaatttcatatcaattccccctttgtgatatatatgcagcaaactggttatgtaatccggcataccccctctcgatgcttgtcatttcaggcatataaatggcaggcaacgtaatggccgggagcggcttcttcaaatgccgggatttgttccttgcagatcggtttggccatcgggcaccgcgtgtggaacacgcagcctttcggcgggtttgccgggcttggcagttctcctttcaggatgattcgttcccgcttgacggcgtctttttttctcgtgacgggcactgaagacaaaagcgcttgcgtataagggtgaagcggattgccgtacagctcgtgtttatcggtcagctccatcatttttcccagatacatgacgccgactctgtcgctgatatggcggacaacactcaaatcatgagaaataaacaaataggtcaggttgaattcatcctgcagttcttccatcagattgatgacctgggcctgaatggagacatcgagtgcggaaacgggttcatccgcaataatcagctcgggattcaacgtcagagcccgcgcaatcccgatccgctggcgctgccctccggaaaattcgtgcggatagcggtttgcaaagctcggatgaaggccgactttcgccagcagctcctccactcgctcgttccgctcgctcatgctgtacatatggtgagtctggaacggctctttaataatggaacgcagcgttttcctcgggttaagggatgcgaagggatcttggaagaccatctggatgtttttgcggacgctttttctcagcttttcttcagataagccggagatatcctgacccttaaaaagaatccggccgtctgtcggcttgtataaacggatcatcgtccttcccgccgttgatttgccgcatcctgattcaccgacgatgccgagcgtctccccgcgcttcagtgaaaaagaaacaccgtcaacagcctttatatcaccgactttcctttgaaaaaaaccggagcggatcgggaaatatttttttacgtctttcagctctaaaatcgtttcttggcctgcagctgtcattttgattgggcaccctcttcctcatataaaaaacatcttacagaacggccgctttcatgcgttatcagctccggctgccctgttttacatttgtccatcgcttttgaacacctcggggcaaatcggcagccttccggaagattatccggtgtcgggacactgcctttgatcgcttttaatgtatcaatctctccatctatcaccggtatggagtttaacagcccctcggtatacggatgaagagggtttaaaaataagtcctccacactcgcgctctctacgacttgtccgcagtacatcacgatcaccctgtcggcggcttcggaaaccacacctaaatcgtgagtgatcagcagaatggaagtatcgaattttttgcagaggtctttcatcagctccaatacttgggcttgtatcgtcacatcaagcgccgtcgtcggctcatcagcgatcagaagcttcggattgcagctgagcgcaatggcgatcatcaccctctgtctcatccctccggaaagacggtgcggatattctttcattacttgttccgctctggagaatccgacgagttccagaagctcaacggcttttttagccgcttcttttttattcatttttttatggtattcaagcacttcggtaatttgttcgccgatggtcagcaccggattcagggaagtcatgggctcctgaaagatcatagagacgtcatttccgcggattttgcaatattcgttttcggtgaaggaggccaggtccctgccttcaagcttaatcgagccgtccataatttttccgcccgagccttggacaagtcccataatagaaagcgaggtgatgcttttgcccgagccggattctcctacaagagcgacggtttcgcctttgttaatgtgaaaatcaaccccgtcgactgcggggatcggctgtttctttctgaaaaaataggtctttaaattattcacttctaatagtgtgctcatgatacgcccctttctcattccgctgaagcagagggaaacatacgtttcgctatcacaaaatatagaatagtcgaaaaattttatagttgtatattattacatcattattacaaaagcaagaattttttaggataaatgtaatatccttaaataatttccattcttttaatctattaaagcgttgcctccagaaaggtttttgaagggatggccaatgcttcttttactgttttttgatggccggttaaatatttttttactatattgaatccgacggcatagccgagcattgaggggaagtatccttttccgtataacagctgggaaaacattctgctgtctctcgttaagcggaggttcggcttgactcttttttcaaacagaaaatcaagctgctcaggcgtatagtaggacgtccattccgccgtaagacttgagccgaaccgctcatatacagcatattctgccagcccctccatcatgattgtatcaagaaatgtctcatctttttcgtcctttgtcacatgttctaaccggcagacgtgattatattcatgtgtcataagggcggatacagctgaattggaactatccgacgatagaaagaggaacattttgtcccgaaaggccagaccggattttgatccgaattcctgacggattttccggtttcgttcgtcgacgggcaaaactacgatcggcacgtccggcccgttccacttctcctttaaataagcttcctccttttgaatatggctgtagcatcctttttctttcagccgtttactggtcctaacgccgtccttcaaatggcggaacatgccgtggttttgcagcatcccgagtatcggcttccactctttcttatcggcccctgcaaaaagcggcaaaagatgcggggccagatcatttacggatgccgccttttccatccattgatatgtctgcttgacgctcataccggttcgcctcctcttgttgttatcatatgcacacacaaaaaaaccggccacctttttcaggcagccggtcaaaactgtattattgatattttttaaagatcaaagtggcattatgtccgccgaagccgagcgagttgctgagaacgatgttgacatcctgctcgcgcgctttgtccggtacataatctaaatcacactcttcatcaggtgtttcgatgttaatcgtcggcgggataatgctgtctttaatggccatgacggagaagattgcttcaattcctccggcagcgcctaacaaatgacccgtcattgattttgtcgaactgacggcgagcttgtacgcatgatcaccgaaaacggtcttaatggcttttgtctcgtatttatcattgtagtacgtgcttgtgccgtgagcgttgatgtaatcaatttcttcaggcttgatgcccgcatctttgattgcttcctgcatcgctctcgcaccgccttctccgtcttgggcaggcgcggtaatgtgataggcatcacccgttgagccgtagccgacaatttccccgtagattttcgcaccgcgggcaagggcatgctcaagctcttcaagcacgacgatccccgcgccttctcccatgacaaagccgtcacggtttttatcaaacgggcggcttgccgttttcggatcaggatttgtagaaagggctttgtttgcgctgaagcccgcaaatgacattcttgtcagcggcgcttccgttccgcccgtaatcatcgcatcggcatcgccgcgctgaatgactttaaacgcgtcaccgatagagttcgttcccgtcgcacatgccgtcaccgtacaggagttgactccttttgctccgagagcgattgagatttggcctgtcgccatatccggaatcatcatcggaacaaagaacgggctgacccgtctcggcccttttgtcaggaagatttcgaattgggattcaagcgtttcaagaccgccgattccggacccgacccaaacgccgactctcggcgcgatctcgtctgtgatgttcagaccggcatcttgaacggccattttcgcggctacgacagcatattgcgtgaagcggtccatttttcgcgcttcttttttatccatgtaattttcaatattgaaatctttcagttcagcagctactttcgccggatactcgtccgattccacacgtgtgatcggtccgattccggatacgccgccgattgcatttttccagcttgtttcggcgtcgtttccaagcggagacagggctccaagccctgtaacgactactctttttttactcatcttgtgtgcacctcacctttttttatcgtccccagcgtattgctatggcgccccatgtcaatcctccgccgaaaccgaccatgacgatgacgtcgccgtctttaattttgcctgcttccagttcctctactaatgaaatcggaatggatgctgcggatgtgtttccatatttatggactgttttagacatcttttcaaccggaagctccaaacgttcccgtgccgcttccatgatgcggatgtttgcctgatgcggaatcaaaaagtctacgtcctctttggagaggccggctttttcaatgacatttacactcgattcacccatttgccggacggcgaatttgaaaacttctcttccatgcatgattgtatgtcctttttcatctaagtacaagtgctgaccgcctgtaccgtctgctccgagctcaaatgacagtatgcctctgtcgtcgctgaccggtccgatgaccgccgctccggctccgtctccgaacagcacagccgtattgcggtcgtcccagtcggtaatgcttgagagcttttccacgccgaccacgaggacatgtttgtatgtttgcgattcaatgaattgtttggcggttacgataccgtacataaaacccgcacatgcggcgctgatatccatcgcgcacgcttttttggccccgagcttctcttgtatcatacaggaaacggtagggaaggactggtcaggagtaaccgtcgccacgaggatcatatcaagctcctcagcggaaatgccggcctgatcaagcgctttttgcgcagcctcagcggccatgccggatgaatacatatcttccgcggcgattcttctttcttctatacctgttctcgtacgaatccactcgtccgatgtatctaccatttgttcaagatcatgatttgtcagcactttttccgggatgtaacggccgacgccaagaattccagctttcattggaaagactccttttttataatgaatttaaaactaattagttatgatcaattattagtatcaggtactaattctaccctattttttttctgttggcaatatattcgtctaaactatcggacgctgctcctcatagaataaaaggaagacgaaaggaggcttcactatggatattttctccaaaatgatgttcggcgattccagagaccgggataaagaaccggaagaaaacccggagcagcctcaggctgaaaacgaagaagagatcgattacaaccacgtgatgaatcagctggggtccatcatgaactctctggatcaattaaagcctgtatttaaagacttcgcgccgatggtgtccgctataaagaaaaaaatcatgtgaaaagccacttcatgaaaagtggctctctttatttattcagctccccggcatcagatctgccaagctcatacgcttccgccatgaccgatgtaaacaggtccataaacggctgaatcatttccaaagacagatctatgccggatttctcaagctccgcctttgcttccggcaggtatttcatcgcgatctgcataaattcaagagacttttcatgctgcatgtgtatccacctctattcatttgacggcagttcatttgttcggttatacgtttttacaaggtctgagattttgtcttgaaatgctttgtccaccagagggctgaacgtccccatttcaacgactccttccctgaaatcaaagttgtgatctccgctcttgagcgtacctttattatattgctcggcaattaatgtataggctttatctacgttttgcaccgtgcttgtcagcaccgtgtttttgccgagattcgattgctcggcgacatagccgatggcgtaaagcccgtcttttttgatttgctgaatgacaggaacattatacccgtctccggccggatatacaacatccgtgccttccgcttttaacttctcgtaaagatgcagcgcttcattgccgttatcccagtggtccgtaaattcagtattgacggtgatatcaggcttttcatatttcgcccctttgataaagccgtctacttcaggctgccacaaaaaggaggcgatgacgccgacctcattggtttttgacatatgggcggctgtcattcccccgaaaaaacccattgcttctcccataagatgaacgcttgtgacattatcgcttttcgccgttccgtttgcgacgacgaattccatgtcgggataatccttgctgatcatattgaagatttcctcgtattcatttccgtgcccgtataaaagattgactccttttttatgaaaatcatctatcgcttttaaaatatcttcatcggatctgatattttctttataataaacgtcaacgttaaattcagattgtatcgctaataaacctttgtaaccttttgtgccccataccaagtcactgatagtatcgggaaaaagcattccgaccttctcaatttttcctttaaacggagtttgtgcgcatccgctcaataaaaggaggacagaaaagatcatgacaagcctggtgatcaagccatgttcaaccccttttcaaactcataacatgtataattgatatacgtttattgtagcggtaatgcacataacatggaaggtatttcttaaaaaatgtcgaatattgatgaaaattgtcttttccattctttaattttttcttccgcttccgttttttgcgttttttcttttatttccagggtaataatctgattttcgtcttctgtgccgtatgcctcaagctgattcatcagcccgcagactgcgtcttctaaaaagatcctgctttcgccatcttcttttgcttctgtccacggaccgtaaaggggaggaaggataatcgcttttgccgtatcccgctgaccgtttttttcccagtctccgtgatcctcactgtaaacaatccaatataaaggctcagccctttcttcaggcagacacccgctcccgtattgaacgcagatacgatcgtattccttttcaccgatttcatctattatttgaaaaagcccgtttctcgcgagccacattaaacgttcttctaaatacagctgcctcgttttgtcctccggttctgccaaaatgacatcaacatgcacaccctcatccatcaaccgttcgcacaatgaaaggccgagaaattcatctgctccaatgatcagcgctgtcttcatcacatctgccgcctttccggtttttcattcgcacacaagccaaacagccctctgaaaagagatggctgttgtattctattcattacaggtctttttcatgactgcggaaaaaccggcagatggctctgtacatacgcgcagggttctcaagcaggtgatacgtgatatcagtcttgcttccggtcttttcccgggcttctttatacgcattcgcatgcagggtgtacgggtacggcgctccggtcgttctttgccatatatgtaccggcacgcgggtgcggcagccggtaatggtctgatagctcagtgagcttgcctctttttcagaaacaccgaagctctgtgccgtttccctcagaaactgcttataaaaaaacttattttctttctctgattcaaaatgggcttgaaggtcaagacaaggatctaacattgcggctgaacggatatgctccgctgaagactgcagcaattgatcggcgataagggcgcccatgccttctgcgagcaagtgtattttcggattgaggatttcttgtttcagcacataatgaatcagctgtctggcgtaaaggacggctttttccgaaccccaatgccgtccgtataaattgctgttaaaaatggtgtatcctctgtcaagcatcgtatttaacagctggtttctcccttcatgttcgagccaaaagcttgagtcccggctgacaaagtgggttctgtcccccagaataaagatacagaagccattcggccgatacggcagatggatgacgttcagctcagatccgaattggaaaaatctttccgtaatccccatgcctgcccgcctccttttactcctaatctctctattggctatcatatgtaagaagaatgaaaacggatcggataaactcctatttgctgctatgttttggctattatcccgagcacaggaaccgaattttccatcagacggccggacaggcgggcaaatgtcagtttcaggcgcgctttttgatgagaaaatgaccttccgcccgcgctttatgtatggtatgatacaacgtagaataaaatgaaggacgaggtggaaacgtgcggtttattatcggttttatttggacgttccttttaacacatatggcctgttatttggtcgcctccatgaacagcgcggcgtacaatttcaagcaatcatccgttattgccgtggttattgcggtgctagtctttgttcttgcggagatcatgcctgtcaaacaggatgcaagccagcattaaataaaaaaacctgctattcagcaggtttttttgtgttcacggttttcgttgatacgtccacaatctgttgtggtttgaagtttcagggaacatttcccccaccgtaagcttgattttttgcgggtttttgaccatgcttcccgtttcgccgatttcaacgtacacaccgttattcggcgctttttgtcccgggcggaattgatgctgctgtcccacgtcatttcctcctttttcttttttatgtagtatgcgcttgtatgcggagaaatatcaaaaaccgctgaatgagattcagcggtttttttgttcatcctgtttgtaaagaagagctttcaggagcgctttttgcgcgtgaagccggttttccgcctgctgaaataccgcagagttcggaccgtcgataatctcggacgtgacctcttcttcccgatgcgcgggcaggcaatgcaaaaatgtatagtcgggttttgcgagactgacgagtgaggcgttgacttgatacggggcaaacacattcagccgctgctgcgtctcttcctcctgccccatgctcgtgaagacgtcggagtaaatcacatctgcatcccgcaccgcttcctgcggattttcggtaagggtgattttcgctccggaaacagccgccgcttctttcgcggcattcaccgcctcttcctctacttcatagcctttcggcgaagcaatcgcaatgtcacagcccatttttgcgcagccgatcataagtgaatgcgccacattatttccgtcaccgatataggcggcttttactcctttcagttttccttttatttcttgtatcgttaacagatccgcgagtgcctgacacgggtgataccggtcggtcagcccgtttatgacgggaatgtctgcatgctcggcaagctcttcgactttttcatgctcaaaggtgcggatcataatggcatcaacgaagccggacatcaccttcgccgtatccgcgaccgtctccccccgcccaagctgcaggtcgctgcttgaaagaaatagtcccgttcccccgagctgggccattcccgcttcaaaagacacacgtgtgcgggttgaagatttttcaaaaatcatcgccaatgttttcccttggaaaatcggctgtatcggatgttgttttaataatgaagcttctgtcagaagcgctttgatgtctgacgggctgacatcttttaaggaaagaaaatctttgccgtacaaatgggttaatgtgtgttccgcttttattgtgtgcatgatgccacttccttttgataaagatctttgagcgatacaggctcaggtttgccggagccgcttgctaaaaatgcctttacggtttccggttcagtaaagaccgtcacaccatgcgtcatggcttcgatccgttgtttacgcgcttcttcagagtgattgaaattgatatggaccgctttatcctttcgctctgcccatgccgggaacgcatctttgcataccgtaaatcccgcctcttgagcctgacgttccaattccgcatcacagccttccagatagatgctgccttttttcacccagacgtgcgcgtagatttttttcagggcgctttctgcgtcaaacgcgacacacatgccttctccggtcgacttcatttccggcccgggctttacgtccacatcctgaatggcgtgcgaagaaaaaaccgggaatttcactgccgttccgtgctgattttgaacctcgggcttgatgtctttaagggaagcgccggccagcaatctggcggcaagcgggatcatcggcacccccatcaccttagacacgacaggaaccgtgcggcttgcccgcggattcacttcaagaacgagaatatcccctttgtcatcaatgacaaactgaatgttcatgatgcctttaaaagccagttttaccgcgattttttcggcggcctcttttatattccgctgcatatcaggtgtgacagacggacccggaagaatcgcaaaactgtcgcccgaatggacgccggcgcgttcaatgtgctctgtgtaagtcggcacgaatacttcatgtccgtcggaaatcagatcgatctccaattcttttcctgtaatgtactgatcgatcaaaatcggatacggcatgcccgcttcatttgccagcagctctgacatttgcgcttctgaatcaacgatgatcatgcccatcccaccgatgacataagacggacggatcagcacggggtagccgattcggcttgctttttccgttgcttcttcttttgaataagcggtttcgcctttggcatgtttcaggtcaaggtcatcaagcagctgataaaacagatcccgatcctccagcgcatcaagggtttcaaaggatgttccgagcagcggaatgcccgctttttccagcggttcagcggcattgatcgcggtctgccccccaaactggacgatggcaaaatcaatgttttcatgttccgccacgttcaaaatatgttctgtcgtcagcggttcaaaataaagccggtcagcgatttcataatccgtgcttactgtttccggattgttattgatcataatcgtttcataccccagcttttgcagggtcagaacgccgtggacggcactgtaatcaaattccactccctgaccgatgcggatcgggcctgagccgatgatgagggcgcgttttttctcttttcggctgatatctccgtcgctttccccgaggtaggtggagtagaaataattcgtcttggcatcaaattcagcggcgcatgtatctacgattttaaacgacgggacgatgcctgatttctttctgagagcacggatgtcttcttccgtttttcccgtgagagatgcgatcatgacatccgtgaagccttttaccttcgcctgctttaaaagcggcattgacagatgatccccttcttccatcagcttgttttccaatgtgatgatatttcggaatacatggagaaaaaacgggtcaattttcgttttggcatggatgtcttctatcgtttcaccgcggcttaacagttccatgacgacgaaaaatctccggtcatccggcgttaccgctaattcccacagctgattgatcgtacagccgccgagttcaggcaggcgggtgccgatcgttttcagctcaagggaggccgccgctttttgaatggccgcttccatatttctttcaatcgccatgacctctcccgtcgctttcatcttcgttccgagcgtgcggtcggcatgtttaaatttatcaaacggccagcgcgggaatttgacgatgacataatcaagcgccggttcaaagcttgcataagtagagcccgtcagcggatttttcagttcatcaagcgtatagccgacggcaagtttcgccgccattttggcaatcggatagccggtcgcttttgacgcgagagctgaagagcggctgacacgcgggttcacttcaatgacatagtactgtttgctgaacggatccagcgcaaattgaatgttgcagccgccgaccacatccagcgccgaaataatcgccaggcttgctgaacgcagcatctgatattcttcatccgttaacgtctgggacggtgcgacgacaatggagtcccctgtatgcacgccgacgggatcgatgttttccatattacagacggtgatgcatgtatgattgctgtcgcgcatgacctcatattcgatttctttaaaaccggcgatgcttttttcgacgaggcattggctgatcgggcttgctaacagcgcctgtttaataagcgtctgaaacgcttctttcgttttcgcgattccgcctccctttccgcctaacgtgtacgccggtctcagaatgaccggcaatccgatagactcagcgaaacggagggcgtcttcttcgttgtcgacgatttcgctttccggaacgggctgatcgagctctttcatcagggcgcggaactgctcccggtcttcgcctttttgaatggtttccaccgatgttcccaaaagcttgacgtgatgcttcttcagcacgcctgcttcttcaagcttaacggctaaattcaatgccgtctggccgcccaaattggcaagcagaccgtctggtttttctttttcaataatggcctcgatgctgtcggttgtgagcggttcaaaatatatttcatcggcaaacgcctcatccgtcataatcgttgccgggttgttgttgactagaataacgcggtatccttcttctttcagagccatgcagccctgcgttcctgaataatcaaattctgccgcctggccgatgatgatcgggccggagccgatgactaatatgctggaaatggttgtatctttaggcatgagcgatttctctccttgctggtatcactttctctagaaattcatcaaatatccactcgctctcagccggtccgggatgagcttcagggtggaactggacgcttaatacgggaaggcgcttatgaatgagcccttccactgatgtatcattgacatgatgaaatctgatggacagctcgttttcgtcaattgatgcttcatcaacgacatagctgtggttctggcttgtcataaacacccgtttcgttttccggtcaatgacgggatggttggcacccctgtggccgaacggcagcttatacgtatttcctccgaaagccagggcaatcagctgatgcccgaggcaaataccgagtgcggggaaatcactgagtaatgatgtaatccggttcatgtacggcgcaatcgctttcgggtcgcccgggccgtttgagagcacgattccgtcaggctgaatgtcgtaaacagcgttcatctgctgatacggaatgaccgttactttacagccgcgctttacaagtgacgaggcgattgattttttataaccgaaatcaatcagcgcaatatgccggtctccattccccattgacgtgatgtcttcagactgcgccagctccgccgggttttctgttccggatgctgccggaatttctcctgttgttgacacggcagcgttcatcgtgccgccggagcggatggttttgacgacggcccgtgtgtccacttcggttaagagcgggatgttccatttatttaaatactctctcaagcttgagactgcttcatggtgagaaaaatgttcacacgcttcatagacggcaacagccttgacttgaggaatcttactttcaaggtctttttcattaattccgtagtttccgatcagcggatacgtaaagacgacgatctgacccttatatgacgggtctgtaagcacttcctgataacccgtcattccggtgaaaaaaaccgcttcgccaacacagcgggcttctttttcaagttcaccgccgaatgatgttccgtcttccaatactaaatagcctttcatctaaagcccacctcttgatgaataattaattaaaaatatgaatttttatacttttatatcgaaaaaaaattaccgtttcactgccgaatgcgcttcgatcgctgctttcagcatactgacggccgacagcatttcttcttcagaaaccgtaagcggcgggagcagcctgatgacattcggtccggccggaagcacgagaagcccgcgttcctgcagatctccgatgatgccggacacgggacctgcgcattcaatgccgattaataacccttttccgcggatttcttttacaaaaggccctgtcagttcacggttcagctgcgcttttaaaaatgatcctttgtctgccgccgcctggagaaagtccggctgaaacacaatgtccaaggttgctttcacagctgccatggcaagcttattgccgccgaaagtcgtaccatgcgtacccggcgtaaaggcgtcgccaagcttctttttgccgatcacggctccgacgggaaaaccgtttccaagccctttcgcagcagtgatgatgtccggcgagatgccgaaatgctcatagccgaatgccttgcccgtccggccgattccggtttgaatctcgtctgcgataagcagcgcctgtttgtctttgcaaaatgtctgtaaggcttcgatgaattccggatcggcgggattgactcccccttctccctgcaccgtctcaagcatgacggcggcgatatcatcctcttttgaaagcgtgctgaatgccgacggatcattgaacggaagatagtgaaagccttgaagcatcggtccgaaaccggtcttgattttgtcttgtccggtggcggccatccccgcataggtccgcccgtgaaaggattgatgaaatgttacaatttttgtctttcccgttgctttacgggcaagcttaatggcgccttcattcgcttcggccccgctgttgcagaagaaaacgagatcccccgcgctatgttcggcaagctttgccgcggctttttcctgaagatcattttcaaacagattggaaacgtgccatacgctgtcaagctgttctttcaccgcttctgtgacctcatcatgacaatggccgagattggaaacggcgatgccctgaataaaatcgagatacgtttttccgttttcatcctctgcaattgtccctttcgcttttttgatatcgatgggccagcgactgtaggtttgaaatagactgctcatgacacgctctccttttctttgacaatttttgttccttggaaggcttgatcggtgaaaaacgctccttttccgtttacgatcatcacttcctcgacatcttcactcagtgccgataatgccgagtttaccttcggaatcatccctcctgaaatcacgccgtcatctatgagggcctgaatctcttgcggcgtcaaagtatccagcctgctctctccgtccataattccttcgacatccgtgacaaataaaagtttgtcggcgtgtaaggctgaagcgacggccgatgccgcggcgtctgcgttgacgttcagcgtttcgaaatcacttgtcatggaaagcggagcgataacgggaatgatgccttctttcattaatgcgtgaatgattgacggatcggttttttgtatttcgccgacttctccgtatttgtcttgattaagataggatgcttgaaggagaccgccgtcctttcctgatattcccgcggctttcagcccgtttttcgcgagttcggttacgaaaaatttattgatcgtccctgacaagaccatttccgctgtttccagcaccggtttggtcgttttccgctgtccatcgacaaattccgtttcaatctgcaatgttttcagcatttttgaaatgtccgggccgcctccatggacgacggcaatgttccagcccgattgcataagctcttttacattttgaaaaaaatcggcggataactcgcggattacgctgccgccgcacttaaaaacgatcgttttcttcatgccgctcccctttgttatgtgcgatagctcgcattgattttgatataatcataggttaagtcacagccccatgcccggccgctgccggagccttcctgcaggcggactgcaatcgtaatctcatcacctgataagtactccttggcatcagtttccgaaaacggctgaggttcgttgtgtttaaacagacactggccgccgaggaaaacttccacttgttcggccgttacgcttgccgcactgtgcccgattgcgccgatgatgcgcccccagttggcgtctgtgccgtaaacggcggtcttcacaaggcttgagccgacgatttttttggcaataatattcgcctcaaggttatttttcgcgccttcgactctggcttcaattaatttcgtcgctccttcaccgtctctggctatatctttggcaaggtcttcgcatacaagctttaatccctttttaaaagccggccagtcagggtgctgctccgtcaggcaatcattccccgcgcagccgtttgccatcacaagcaccatgtcattcgtcgatgtttctccgtcaacggtgatttggttaaatgaaacatccgtaatctctctgagcgcgtttttgagcgcctgttcttccacggccgcgtccgttgtgacaaagccgagcattgtcgccatgttggggtggatcatgccggagcctttcgccgctccgccgatcgtgatgatgtctccgccgatcaccagttcataacacgtctgtttcgtcactgtatccgtcgtcaaaatggcttcttcaaatgctccggacatggatggcgcttgaccgagctgttcaatgcccgcttgaatttttttcatgtctaaaagctcgccgatcaccccggttgacgaaaccgcaacaagctccggctcaatgccgagctggctcgcgaagccgtcccgcatttcataggcgtcctttaatccttggtctcccgtacaggcgttggcaatcgcgctgttgacgataaccgcctgaagcataccctcttttttcaggctggcttgcgtcactttcagcggcgctgcctgaaaatggctctgcgtatataccgctgcactgactgcaggcgcttcgctgataatcgctccgagatctttttttgaatagcgcagaccgcaatgcacgccctttgcctcaaaccctttcggcgaggatacgccgccttttattttcgtgatttcctcactcagctgaatcatatttttgaatccctctttcgttctatggatagactggcgtcatcgtaagtcccgtttcttcctgccagccattcatgatatttaaattttgaaccgcctgccctgcggcgcctttcatcagattatctatgacagaaacgatggtggcacggtttgttctttcatccacggtgacactgatatcacaaaaattgctgccgtatacctctttcgtcgccggaaattcaccttccggcctgattctgacaaaatatgaatctttgtagaattcggaatacaattctcttacctgtgcagcagacatacccgggggagcctccgtatacatcgtcgccataatgccccttgtcatcggcgccaaatgtgcggaaaacgtgatcgggcctgtgccgggctgccaagccgctaattgctgttcaatttccggagtatgctgatgctcattaaccttataaattttgaaattatcattcagctcagaataatgagtgcccatggatgcttttcggccggcgccggatacgcccgttttcgcatcaacaatcagaaatgaatcttgtaaaagcttattcttcgccagcggggcgagcccgagcagcacagccgtcggaaaacatcccggattggcaatcagctttgcagtctgaatctcttctttttgcagttcagctaaaccgtaaaccgcgctttgaatcgttcctttcggagcggccttccgcttataccacttttcatacacggccgggttttgaatccgcagatcgccggatagatcaatgaccggaatgcccgcctccgccagcttgggcgaccactctccggaaacgccgggcggcgcggctataaacatgacatcaatttcgtttcggatcgtttctatatgaagcggccgaagtgattgtgacgctatattcctcaaatgcggatatgaagcggcatattcttttccttcgtcgctcgatgaatataatatacaatcttctgcataagggtgatggttaagaatcctgacaagttcggcgcctccataaccagtcgcgcctataatacctattttcaacgggttcaccttcttggtttttgtgaaattatttaacattataacatgaataaaaattaattcaattgtatatttaatattttttcattcattttccatctgttttcgctgacaaaaacccccctctcgatcgagggggcataagaaaaacaggctgatcggatcagcctgtttttttcagcatcatcagcccgcttataaaaaacagcacggagctggcgtaaaaaataatataaaccgtaaagaaatcagcgagaaacccgccgagaataatggcggcagctgaaaatacggccgtccagaaatgatagctgccgactttttttccccgctccccgccgtcggtgtaatcggcgatcatgattttctcgccgtgtttttgcatcgcgccgaacaggcccaaaagcacctgcacaacataaacctggtgcacgccggtaatgtgcgggagcgtcagaagaagcaccgccatcccccacgaatttgccataaggaaccagcgggaatccagtcttgccgacagccggccgagcagcggatgaatcaatgcgccgctcaagccgaacaagccgtatgagagaccgaattgcgtgtagctggaaccgatgtttttaataaataaaatataaaacggaaagatcaggctgccggcaaaaaagacactgctctgtgacaggatcagccattttaaatggttgtgtttcatgatttgtacctctgataaaaataattcataaacaagtcatccggatcatatttgtgttttttctgaaagaacatatcgcttttcggatatgcctcacgcatctgctctttcgtttgatacagcatatacgggagataataactgccgcggtggcgcaatgccgtatccgtcatttttctgacaatccgcgccgcactcgcctggctgtctgttgaaaacccttcattgattaaaagaacgagtgaaaacatgtcttcctttgcgtatgacagatcggctttttcatttttttgcacgtagcggatcgtaatatttacgaggttgagatcttcatgtgacagcgtcttgcgtaaatcatgaatgtacggcgcaaattcgccgacgggcacgaagtattcttgcagcacatcggtgttgtccgtgttttcatattccaaaaatttcgattctgaccgcatgacattgttcctggagactttcacaccgttttgtctgagaaaataagactgctgggttgaccagaaccaatttcttccccagtcataccggcgggagaggccgagcgcgaatttcgtcagcgccggatgctcatcttctttcagttcattgtgccgctttaattctttctgattgtctgagagtgtgtaatcagtcacatacatatcgtgcaaaaagcctttatcccctgttgcgatccgcgcgagatgcatgcgcacggcggggttgcgccgaacatgctgcgcaaaatattgactgtatgtatcagcgttcatgcgtttcgttttcatttcataaagctcatcatccgtcagctcaatatccgcgtccaggatgacgccgaacaggccgtagccgccgatgacggctgaaaacaggtcatctttcggagtaacggtgatgactttgccgtccgcctttaaaagatgaaacgatttgaccgtatcaatcagcgaaccgtaccggatatcccggccgtgggcgttggcgctcagtgagccgccgatcgtaaaaatgttttgcgattgcatgacttttaccgcgagcccgtacggattgacatagcgctgaatatcattccacgtcgctcccgcctgcaccctgatgatttttttctttcggtcgagaccgagtattttgttgtagcccgtcatgtcgagaacgataccgtcttcataatacgtctggccgcccattgagtgctgggcgcctgcgattgagatcttcaggtgctttctcttggcttccttaatcgtttcgaccaatgtttctttctcttttcctttgaccgtctgcttaattttcacgggcatgagacggctgacatccgtcattgtccctgcctgctgctccggctctttgtgaaaagcggaaacagcgaacagcgccgtataaacaaggatgctaaggataatgagaagtaattttttcttcatggattcctccctcgcatgcagccggtctattatatcatgcctcacgtccgtttttttcctttttaacccgatacaggaaaacaccgggtataaaaatccacagaaatccttaaaatgattttttagtcagtatataatcgatatatatgcagatgtattaccaaagggattgtttaaaacaaacatgttaaatgaggtggggaaaataaacataaaaggaatcaatcatcttcttttttctgtttcaaatttggaaaaatctatagaattttatgaaaaagtatttcatgcacagctcctggttaaaggacaaaagacagcatattttgatctgaacgggctttggcttgcacttaacttagaggcggatataccaagaaatgaaatacataaatcttatacgcatatggcctttacaattgacccaaaagattttgatgcaatacatcaaaggctaaaaaatctaaatgtaagtatattaaatgggcgtcctagggataagcaagatcaaaagtcaatttattttactgatcccgatggacataaatttgaattccacacaggtacactccaagacagactgtcctattacaaaaaagataaacctcatatgaaattttatatttaaaggtttgtttgcgatccaaaacaaaccctcactgtcgcttatccgcgttgattttttccttgtaaatgcagacaaaagaaaagcacctccaaactttaggatgtacctaaaatccgaggtgcattttcttattactgaatccctaatgcgatttttgcgtagcgtgacattttgtctcttgtccaaggcggattccagacgatgtggacctccgtctcttttacatccggaatgtcggcgagcgcttttttcacctcgtcgacgatgatcggagcgagcgggcaccccattgatgtcagtgtcatcgtaacgtgcgtcaggccgtcgtcatccatatcaacgtcgtatacaaggccgagattgacgatatcgacgccgagctcagggtcaacaacctgctccaaggcgcccatgatgttttcttttaatgcttcttccacgttccatcactcctttttcctcagtataacgtaaaagcggcttttgttaacacctttgtgctttataaatgcttatcgaaccaggcgacggtttctaaaacggcgtatctcgggactttatgatcagcccgttcgtctttcagaaactgaagatggtcgggccggctgctgtaatgaggtttaatcgtttcataaaagccgcgggtcggtgcatacggaacgactttgtcttgaacgccgtgccagaacagcagcgggcggctgcggagtttttccggttccagactgagatcgaacggtttgagccgcgcaaacagttcatcgacctgttcttttgtgacgtcaatgtcgatgtcctgcttttgaatgtggtcaatctgctgctgaaaaaatgccgtatagttcgggcttcccatcagactgacgccggctttgacccaatcatacgcggccatcgcgccgaatgtcgtaattccgcccattgacgtgcccgcaagaccgatccgcccgtcttcaatcagaccgcgcgcttcaaaatcctttttcagcacgtcaagctcctcgatttcatttaatacaatgtcccaaaaatggacggcgagctcttctgctgacagctgttcagcgcgttcaccgtggtaaagagcttccggcagcacggccctgaagcccttttcagcaagcaggtaagcgaaatgaagattatgctccttcgcgcttgtaaaaccgtgaataaagaaaacaaggggagcgggacggtcccgattttcttcttttacaatatgtaaaaacggaatgcctgatacggtttgatgatcaataagaatcacgttgactccctccttaggataaccataatcataagtgtaacatgtagacaataaagatggtaaaaagctacactgtacataagtgaaaaacagcaaattatatgacaaaaggagttatttatggagacaaaaccttatctcatcgccttagatctggatggaactttattaaaagacgataaaaccatttcccctgaaacggcacggacgattcagaagctgaaagaagcgggccatcatgtctgcatctcaaccgggcgcccgttccgttccagttcgatgtattatgacgagcttgggctgacaacgccgattgtcaattttaacggggcgtttgtccaccatccgaaagacgaatcatggggacgataccacacgtctttatcggtcgatgtggtcagacagcttgccgaacttacagagacctatcaaatacataatgtgctcgctgaggtcattgatgatgtgtacttccattatcatgatgagcatttaattgaggcgtttcatatgaatacggcgaatgtcacattcggcgatctgcgtgaaacggtcaaggaggatgtaacgtccgtattgattcatgcaaaggaagaggacgtcgcggatatacgcgcacatttatccgatgtgcacgccgaggtcattgaccacagaagatgggcggctccgtggcatgtgattgaaatcattaaacacgggatgaataaagcggtcggcctgaagaaaatcagcgactattaccaagtgccgagagaacggatcatcgcgttcggcgacgaagacaacgatcttgaaatgctccggtttgccgggtgcggcgtagcgatgggaaacggcacggatgaagtcaaacaggccgccgaccgcgtcacgggatcaaatgaagcggacggaatcgccgaatttttaaaatcctatttctccctgtgaggttttgccgctcataacacaaagccttccgcccatactaaaacagacgactcatctcgtctaaatatggaagggggacattgcaatgggtaaacgaaacaaatcaaaacggtttattcagcaaggcaaggactctgtcagtcttcatgacgcaagatttccatatcggtctacattagaggaagcacagcatgatgcagcaaaagattcggctgaaaggcaggttgacttttaatgagaaacgaactgttttctcaagccaagtcatttgtccagcaggccgtcatgattgctaacggtttcgaggacggcgatcaggaaaaagctgtctcacgcgccaaaaacgccgtgtcttccgcgtacgccaattcgacggatgcagaacgtcagcagctgcaccaatttcaggatcagctggagaaattgcaataaaaaaaggcgccccgtttagacgagggcgccgcttttttattttacttcaaatgtttttaccgttttcagtctttttccgatctgatcggacttccctaaaaacgtcaccgtcaccgtgtatgttcccggaccgggcacgttcttccacacatctgaaaagtcatacgtttcattcggcattaaggtcacggtctgaaacgcctgagtaaacattttgtcttttgaatagcggtacagttctttgtgatgttggtcatgtacggtcaattcgaatttctgccctgagctgaatgtgaaatcgatcgggctgccgctcttgttttttaaagacatttgaaattcgatctgctgatccgtctgcacagggtttacggctaattccgcttgctgttcattcatctctccggatacctcctcagcgggctccttctgcccggattgactgctgcatccgatcagtaaaatgaccggtaataacaggccaaacagccacttcattctatccgctcctatcagtcttttctgaagaaaccaaagatccccgtcgtttgcacgatgtttgtgaaggctttcgggtcgacttctttcacgattttctcaaggtcatacaattcgtaccgcgtgatgacgatgatcatcatttctttctgttcgtttgtgtaagcgccttttgccggcaccgtcgtaatgccgcggaccattttcccgtaaatcgcttctttgatttcatcggctttttttgtaacgatcatggcggtcagtttcatgtggcgggtgtgaatggcgtcaatcacccttgttgtgacatacagagcgacaagggtatataatgctttctcccatccttgcaataatcctgccgtcaaaatgataatcccgttcaaaatgaagaaatatgtgccgaccggcttatccttccatttggccagcaccatcgacacgatatcaagaccgcctgtcgaagcgccgaatttcagcgttaaaccgatgccgatagctgagatgactcctccgaatacggtattcagaagaatatcgtgcgacagtctcatttccgggagaattcccataaagacggacgtcagcgctacgcttaatatgctgtatacagtgaatgatctgccgactttcagccaccctaacacaccgatgggaatgtttaagaggaacatgagaactcctgtcgaaatataaaagggggcgtattgatcaacgacgcttgacagcagctgggcgacaccggtaaaaccgctggcatatacattcgccggtatcaggaataaattcagtcccgccgcatacagaaacgcgccgatgacgacgattgctaatttttttgcttgttctagtaccatggcttgctcctccgctcattttcattattagcttttcccttaaaataaagttttgaacactattttgccacatttatatgatatagttggcatcactctcaccaatcggaaagaagggaattatgatgacagttcaccttattgctgacagcgcctctgacctgccgaaatcttatattgaagaaaaccggatcgggttcattccgctgcacgtaacacttgacggaaacgaatatgaggacacggtcaccattcaggcggatcatatatttcaagcgatgcgggacgggaaagttccgaaaacatcccaggcatcaccggatacgataaaaaaagtatttttacaatacgcggaactgggagacccggcgatatacatcgccttttcctcaggtctttccggcacctatcagacggccgtaatgatcgccaatgaagtaaaagaggaatttcccgattttgatttacggattgtagattccaaatgcgcttcattgggctgcggcctcgcggtgatgcacgcgcaaacactctgtgttaacgggaatacaatacaagaaatcgaaacgtctgtaaagagcttttgcgcacggatgaaacatatatttacggtcgatgatgtcgcttatctcgcgcggggcggcagaatttcaaaaacgtccgcttttgtcggggggcttttgaacatcaaaccgattctgcatgtggatgacggcaggctcgtgccgctcgaaaaattgcgcggacagaagaaactgtttaaacggattatagacatgatgaaggaagaaggcggcgattgggcggatcaaaccgtggggatcagctatgcagataacgaggagacggcgcttcggatgaaggaaatgattgaagaagcgttccatccgaaagagaccattcttcattcaatcggctctgcgatcggcgcgcactccgggccgggcacgctcgcgatttttttcctgaagccataatttcaatgcgggcgggcatcctaacggacagaagggaggctttgccgcatgaaagatgatgacaaaaaaccgttggacaataacgccgtaaatcagaaaaagaaccggcttgccgaaaaaaaccggcaggcgggaaaaaaccagaattccaaaaaaccggaccatctgtaaaagcaaaacagccctcttgtggatgaagatagagggctgttttttgttctatatgcgtctaacatcacttatcacgaatccgctttcaggcaatgccggcattctggacaggctgaagctcaaatcttgggacggaacatcgtactctatttcattggcaagaaacgcaagggaagttttcatgacttccacggtcattccctcacccggacagcggtggccgttagccggatcacctccgccctggggaatgaaatcaaatttattttcctcccgcccctgaaaacgttccgggcgaaattcattcggattctcccaaagccgggaatcatggtttgtcccatataggtcaagcatgacggatgcaccttttttaaactcacagttcttccatacgaaatcttttttcacaacggctcctaaaaacggggcaaacgggtaataccgccgaacttcatgtacaaatctttcggcctcctgatcatctctcgatctcagtttaccccgatattcagggtaatcatgcaatgcaagagctgaaaacgtaatgaagtaagaaatggcggcaatcgggcgcagaacattaataagctcaacagcagccatgtgagaatcaagtctgttcccgtcaagttctgtatgaaaagccatttcatacaaggctgagccctccggcgtttgcagcttgccggaccgcacatcctcaatgacctcctctatccatttctccgttttcagcctcgcccttctgcctttccaatgacgcggtccgacagcgccgaatgcgtctaccatatcggtgaaatcctccgcccgctctttcacttctgagtctttcagcgggacgccggcccactcacaggcagcccggcacagcactttcttcgcttcatcaaaaaggacaattcggtttgaaccctcccacatttccgcagatgctttccactgttttgccaccgcttccgcaagccgtttttgccggggcggcgtcatcagcgacataaatagaagcttcctgtgcttatgccgttcaccgtccattgactggattgcccctgttccgaataacgttttctgcacccgtttggggagggcatgctcccgctgaaatcgttctgtgtcataaaaaagctttgcggcttccgctccgctcatacaaatgaatgtcttccctaataaacgggcgcgaaacacatccgagcgataattctccgctctgtttttcacaaatacatatccatcgcgtaataaagccagactattatcaagacccttatcatgcggaatttgttcattcatcccgattcctcccatcttttttcacctttcacgaaaaagaataaatataaacacaagtatattcagtatttgtgtttcattcagaagttactcatgtcaggctgcaaaaatcagggggcggggcataagcccgttacaaagtaaaccggcggacctgatcgtttaaccgctctgtcaggctcaccagattatcgacgctttccgccattttatgaaaagaagacagctgctcaagcgcggaggcagaaatttcttcgcttcccgcagccgtttcctgaacgacggcactgatgctttcggcatgatgcagcacttgctcaccaagctgtttcgattcgatgatccgtccgtccaattgagtaagctccgctttaatatgggcggctttttgttcaatatggacgaatgattctgacgttttctccatcagctcctgctgtctgtccgctaaagcgacgccggtcgtgacagctccggtaatagatgtgatgccgtcttcaatttgctttaccatatcgaaaatctgcgcggtcgctttggctgatccgtctgcgagcttccgtatctcctcggcaacgacggcaaatccttttccggcctcgcctgctctggccgcctcgattgcggcgtttaatgacagcagattggtctggcccgcaatgtcagaaacggtctgcgccatcatactgatgcctgccgcatgctctatgaagagatcggcggcttcggaaatctcttttgatgtctcattgcttttatcaatggcttgcttggtctcggctaaagcaccgcgccccgcagccaccgccgcaatcgtctcttcgctgcttctcgtcgtttgttttgaacgttcggcgttcgcctttgaatgttcatccatttgttcaatgaattgcaccgcatgctgcagatcttctgaaatggtttgggagccttgcgccatttcttccgtcgacacggatacctgctcggtcatgtccttcagcgtctggttttccttcgtcaaaccttccgcgaaagtctcgacttcacggccgacctctccgatcgcctgaattaaggtgcggagctgttcagccatcattccgaatgagtcattcagctctttcagttcgtccttccctttataatcaagcatttcaacagcaaggttccctcctgcaatacgacgggcattttcagccatgcggcggatcggccctgcaattctcttcgtcagcctgatggaagatatgacggtgacggcaagtatcacgatggtcagcacggctgcgctgtaaacgataaactgaatctggtcagccgtctgcttctgcatgtcttcatagtgatcccggcttttcagattcagcatataaatatcattcagaagaccgttgatgcgggccgccgtccttgtcgcttcagccgggcttttcgaatcaagagcagcgtccgcctccgcctgccatgattcgtattttttggcgagtttgtcataagcggctttgtctgcaccgtccgtcatcgtttttttgagcgccgccagtttgtctgagctgcttttcatatagcttcgcacatcttctttctgggcgtctgcgagcgtataggaatagccggtgatgctttcttttaacgtattaaggtcagcttttgcttcctgaacgtttaacagcgcgtccacttcatcttcatttgaagcctgaatcttcatcatgtttacgatggtaaagccgatgacggcggcgaagcaaatcatcgtaacggctgcgttaacgagcagccttgtccgtaatgtcacttcagatcgcctcctgtttcaatcagactgtttttcatatccgtgatctttttcgtcagcccgcctgcgtttttgacaactctgatcttagctaagtccatgccgttttccttcagtccgtaaacgatctcaccgcttttgatctccttgttgtcttttaaatctttcgccaattcatagatgacatggtcgacgtttttcactaaagaagagataacggcgtgctcggcggtgtaatattgatcgctgtcaacaccgatggcgtatactttttgcgcctccgcttctttcagtgcgccgacacccgtgaagccggccgccgtaaacaggacatcggctttttttcggatcatgttttgggcgatgcccttcccgagcttatcatcatcaaacgtaccgctgatgtccgacagcacgcggattctcggtttgactgattccgccccttgcagatagccttttttaaaccgtttaatgacgtcggcatctgaaccgccgataaatccgattgtgccggttttgctcgtcatggccgccagcgctccggctaagaagcttccttcatcctctttaaacgtgacggaggtgacattatccaggtctgatacggaatcaatcagcacaaaccgctgcttcggatattttttggcgaccttttctaaatccgcctgcatgctgtaaccgagccccaccacaagatcattgccttccctgacaagctgtgtcagtcctttttcgtatgtaccggtatcttttatttccctatagtcaaatgtgatgccgagctcgtctctcgctttcatcaaaccttgaaagcctgaatcattaaatgattggtcgccgaggccgttgtctgtcagcatgatgccgattgttttcgttttttcggccgccgtttcctcagatttgccggcacatcccgccgtgctgagcgcaatcagcagtacagccgcaaatatcgccatttttctcattgaaactctccttttgtttttttctatagttatatatcggttcggatgtcagaatattttatttcaataaaatatgtatgttcggcaggatgttaaacaaatgagggcataggagcttttgagaaaataaaaaacatcggttttggttcaccgatgtttttgcagaaaatttattgtttttcgtatgtccagccgtcttcctgatagaccttgccgtttttcatcagatgcccgagcgcccgcttaaaggcggctttgcttaaatgaaaccgttcgcggatatcgtcaggatggcttttgtctccgtaaggcatcgcgccgtttcttgatctcagataggtcagaatttcttccgcgtcaaccgaaagcgcatcctgctttctcggcagcagggacatgttgacggagccgtcttccttcacctcgatgacacgtcctgtcacgcggctgccgagtctcggctcttcttttctttctgaagggtgaataaacgcgcggatgccttcatcggtaatcagaaaagagcctgatgcaatcagtctgtacaccgtgcccgtcaggtctttattcatgacgtcttcccctgcatccgtaaataattcactgatgatatcctcaggcgccggcttggcaaacatgcgcccgcggcttgtcaccttcagcatgcaatacagtctgtctcctttttgcggccagacggatttgtacggaggcaggtgctccgttgcgacgagcgcgtcttttgacagaccgacgtcgacgaatacgcccatatcttccacagcgtccgtcacttccacccatccgtagtcataaaagctgatgagcggctttttcatcgtcgccgcgagtctttcctgatgatcgacgtaaataaatacgtccacttcatctctgtcttcgatatcctctgtgatttcactgttatgtaaaagaaccgtatcctcgccgtcggttaaaaaataaccgaaatcggtttggtgatctatactaagcgtgagctgctgccctggtctcatgttatcgtccttcctgattcgcccgtatgaggctgatgtttttctcattttttccaatatgcataaattcatgctttatgctgttggacatttctctttattctactataatcaactcataagtgaaatgttataggaggttttctcatggcaaaagaaagttcttttgatattgtatccaaagttgaatttcccgaagtgcagaatgcgattcagatgacgctgaaagaaatcggcacgcgctatgactttaaaggatcgaaaagcgatgtaactttagaaaaggaagaacttgtcctgatttctgatgacgagtttaaactgaatcagctcaaagatgtgctgagcggcaagctgatcaaacgggacgtgccgacgaaaaacattgaatacggcaaaatcgaaaatgcatcgggaggcacggtgcgccagcgcgcgaagcttgtacagggcattgataaagacagcgccaaaaaaatcaacgcggtgattaaaaactccggcttgaaggtcaagtcgcagattcaggacgaccaagtgcgcgtcaccggaaaaaataaagatgatctgcagcagattattgcagccgtccgcggagcagacctgccgattgacgttcaatttattaattttagataaattatgtgattcctattgattattgtctctattttcggtaaatttggagaaagggattttcacagttaagttttggaaacccatgacaattacatgaacgttcttatcaagagaagccgagggactggcccgacgacgcttcagcaaccggtgtagtggtttacccaaaccatgaccaaggtgctaaatccagcaagctaaaaacagcttggaagataagaagagagacaaatgattacaaagtcttcttcttaagaagactttttttatttctcttttttccttgctgaatgtgacgaaggaggcaaacaatgggactattacaagacttaaaagaacggattttaatcggagacggcgcgatgggcactctcctctattcctacggcattgacagatgttttgaggaactgaacgtatcaaagcccgaagagatcaagcggatacataaggcttacgtggaagccggggcagacatcatccagacaaatacgtacggcgcgaattttattaagctctcaagatacggacttgaggacgaaacgaaaaaaatcaatcaggaggcggtcagaatcgcgcgcgcttcctcagacggcgcttatgtattgggaacgatgggcggcatccgcacctttaacaaaaacgcctacagcctggaggagattaaacgcagctttcgggagcagctttatttattgctgcacgaagagccggacggtctgcttctggaaacatactatgatttagaagaggcgcgtgaagtgctgaagatcgcgagaaaagaaacggaacttccgattatgctgaacgtatccatgcacgaacagggcgtactgcaggacggaacgccgcttcgggaagccctcaggtccattgccgatctcggcgctgacataacgggaatcaattgccggctcggcccgtaccacatgattgaagcgctcaccgaagtgccgattttccgtgacgcttatttatcggtctatccgaacagcagccttccgtctttagaagaaggccggcttgtttatgatacggacgatgcctatttccgggagagcgccgtacagttccgcactcagggcgcgcgcattatcggcggctgctgcggtacgacgccaaaccatatcagagccatggctgaagcggtccaaggactttctcccgtcactgataaagaagtgaaaatcagacgggaagaagaagtcatctcagtccgcaacgaacggaccgagccgggtttaaacgaaatcgccgctcaaaaacggtcaattatcgtagagcttgatccgccgaaaaaattgaattttgacaaatttctgcaagcggcggctgaattaaaagaaaccggcatagaagcgctgacgctcgccgacaattcattggcgacaccgcggatcagcaatgccgcctgcggttcattgctgaaagagcgccttgatatccgttctctcgttcacattacatgcagagaccgcaacatcatcggccttcagtcacatttaatggggctggatacgctcgggctcaccgacattttagccatcacgggtgatccttcaaaaatcggcgactttccgggggctacctccgtctatgatttaacgtcctttgacttgatcaggctgattaaacaattcaacgagggcatttctttatcagggaaaccgctcggcaagaaaacgaacttttccgtagccggagcatttaatccgaatgtccgccatctcgataaagcagtaaaacggctggagaaaaaaatcgagtgcggagctgactacttcgtgtcccagcctgtctactcggagcagcagctcattgacattcatcatgaaacgaagcatctcaaaacaccggtgtatatcggaatcatgccgttaacgagcagccgcaacgcagagttcatccatcatgaaatcccgggcattaagctgtcagacagcatccgcgaaaaaatggcgctcgccggcgaagacaagcggaagcagaaagccgaaggcctcgccatcgccaagtcgcttctcgacacggcgtgcgaactgtttaacggaatttatttaatcaccccgtttctccgttctgatttgacgtcagagcttgcagcttatattaagcaaaaggatgaaaagcgggctgatgtatatttgcattgacgcggaagaggccgcctgatatgacaggcggctttttcatggtacgatacagaaaaagaatcaagcaaaggaggattttttcatggttgaagtaaaacccatcaccgcagaagacacatacgcgatcagacacagcgtgctgcgcccccatcagacgattgaggattgtaaatatgatcaggacagcgtcaaaggagcctttcatctcggaggtttttacgacgggacattgatcagcatcgcttctttctacccgcagaaccagcaggctttacaggcagcgcccgcctatcagctgcgcggcatggcgacgcttgaggaataccggacgcaaaaagcgggaagcacgttaatcgcctatgcagaacgaaaactggcagatatgggggcggcgcttgtctggtgcaacgccagatgtcacgtaaagggatattacgaaaagctcggctggaaaagcacgggcagcccctttgacatacccggcatcggcccgcatgtgatcatgtataaagaactcgcctgaaacagacaaatgcccttggggacatgtctctaagggcattaccttgaatgtcacgcctgcttttatatacggtactattgacgccctcccgcttttttaataccctttgtacattacacaacagcaaggatggcaggcagaacgatatctgtcaattgccgttttcagctattaattcagaaaaggaagtatgagatgaatacgatccaaaaaccgaaaatcccgaaagaattgccggtgctttctttcacagaagcgcttcaggacgacctcataaaagaagtcgtcatagaaaacgccgtggtaaacagcaaactggacggcctgcgcgccgaaaaagtcattttcagaaacaccgtttttacggatgtctctttcagacatatggaatgtacggatgtcctgtttgacaaatgtgatgtctcaaacgctgatttcagcggaagcatcatccatagaacggcgtttcagcattcaaaacttctcggcttgaatctggcggattccgccatgcgtcatgtacggtttgaagactgcctcgcaaattacagctccttcagctattccaatatgaagcatgtccggtttgacacgtgcgctcttacagaaagcgagtggaatgatgccgttcttgaatacacagatcttgacgcctgtgatttgaacggtgcaaacttcatcggcacgtctctttttaatatggatatcagcacgtgcacatttgatcatctgcacgtctcacttgagaagctgaaaggatgccgcatctctccggcgcatgccgttacattcgcagaagcgctcggagccattgtgacgtgatcttttattaaacgaaacggcgggcgatgtccgctatcgtttgaatgcctttttccaagtccggtaaggatgcgtatgaataggaaagacgcaggctttgccggtcttcgggaagatagagagctcccggattgatcagcacgccggcctccaaggcacgggtgaaaagcgtctgaacggcgattgcttgatgaaaagtgacccaaatataaaagcccccctccggcacacgccactccgcaatatctcccgcgtatctttcaagagaacgcaatgccgcatctcttctgattttgagttcctttctgagacgcaaaaggcgcgcttcatagcggccgcttgacagccattgacatgccgcccattgagataaagcactggagccgtaatccgtctgcattttaatatcggcgagcctgtctgcaaccggctcaggggcgacgacccatccgatgcgcagacccgggcttacggtttttgacagcgtgccgatatacagcacattcccctcaccgtccatggattttaacggaggcggcggttctttatcgatccataaatcaccgtatgcgtcatcttcaatgacaggcaggcggtgatttcttgcgaggacgatgagttccttcctccgcttgagtgacatcaccgttcctgtcggattatggaatgacggaatggtgtacagcagccctgcttcgtattgccgccggtaagcaggaagatgatccgttttgattccgctcccatccatcggcactcccttaagcctgacgcccgctgattgaaacacacgcagggaatggagatacgacgggttttcagtcagcatgacagagtttggttttagcagcccgattgaaatgagctgaagcgcctgcagcgcgcctgagacgattacgatggatgccggggacgcgtgaattccctttgttttcaaatgttccgcgacgctttgccgaagctgaaggctgcccttcggttcttcatagccgagcgcaaaaatgttagttcccgcttcacggaacagttcggccatctcctgctcaggcagcagctcttgactcagttcacccgtccccagcctgatcagatccggacgcggctcgttttgattaatggcctgaaccaaggctgaattcggctgatgacttcccgatgtaacgtatgtgctccaatcaaggggcttagccgctgccatgatgctccacgtattgttgacgacctttgtgcctccccctctttttccttccagaagaccttgggcgattaactcatcaactgctgccgtcactgtgcttcggttgacctgaagctcctcggcgagctttctttgtgagggaattttcgtgccgatggtccattcgccatgaagtattttttcttttatatgctgttcgatctggagataaagcggtatgtgcgactcccgatccggacgccagctgttcatacgtcatccctccttctttatttattatacatttggctggttcaagtaccagccaaatggccggagacatcagcacacagtgcggctacaatgagatttagttgacgattggagggttttacgaaatgaatgccattcttcacggagtgatgctcgctttcggccttattttgccattgggcgcgcaaaacgtgtttatttttcagcagggagcctggcaaaaacatgtgtggcaggcatttcccgcagtgattgccgccgcggtatgcgatacgattctcatcagcgcggccgtcgcaggcgtgtcaatgattattgcagagattcccgtttttcagaccgtcatgcttataggcggctttttgtttctcagttttttaggctggcagacttggagaagcaaaccgcaggccgaacaggcgaaaaaaacggttttctcggcaaaaaaacaggcggtcacggccgccatggtatcccttttgaacccgcatgcgattttggataccgtcagtgtcatcggcacaagctccgccgcctatccgggaattgataaatggctgtttgccggtgcttgtatcgcggtttcctgggtatggttcgccggactggcgttcgcgggacggctcgttcaaacggcggatacaggaggccggctcctcggcatcctgaataaatgctcggcattggtgatgtggggtgctgctttttattttgcggcgcttttgtttcgataaaaggaattcggccaggccatgttgaatgtaccggaagaagagggggaattggaatgtcagacattttaaagctgtatcactaccacagatgggcaaatgagcaagttattcagcatctgaagacgctgcccgcggtcagcttacagcagaaactgaaaagtgtttttccgactgtgaacgccgtgcttgtgcatatataccgggctgattacatttggcttcacgtgctttacggagaaactttcgaacaaatcgtctcgcagtttgatcaatttgaaaagcttgacggagattttgaggcggttgaacatagaatgactgaactggacaaagaattcagcgaatttttaaaagaaatggagaacccggaaggcccgatctctatttctcatccgcgcctggggacgcttcagacgacatatgccgatgtgatccggcatgttgtgaatcacggcacataccatcgcggcaatatcaccgcgatgcttcaccaaatgggctataaaggcgtgccgactgactacatttttttctcatacgaatcataaaaaagcaaaggcctcccgggcctttgctttttcacttcgaatctatcataatccggcatagccggagacgcccgctttttcggccacatcgtaaattgtcattttcatgcttactgatccctcttttgttctctggtattaggtcagtccgttttccggcttacgaatttgcggtattcaagcggcgaaatgccttcaatctgtttaaacagtttggaaaaataggtcgggtcctccataccgatggcgtccgcgattgcccccattttgtcattggttgcggacaaaagacgtttcgcctccgtcattctgactttgttcgtatactggccgggcgtgacgccgagcacctgctgcatacagcgggtcacgtagtcttggttgtaatgaagagccgaagagagcgctttgatggttgttttctcctgatagtgctcctgcaggtaccgggcggcctcccatgcgactctttcctttgcggacgggatttggaacgcttctttctgaagatggagcagcagctcttcaaacagaatctgctttctgagcggcagatcggagttctcggcgctgtcatcggtcagcacactgaattgcccggccataaactgcgggcgtctcaccttccctttttgcggcagggacaggcggtagcgggacggttcttcaaagctccctttttttcgcctcagctccgaccaattgttcccggttgtttccgtcacctcataagccgctccctcaaaatgaagccacgaataggatgtcgtttcttcactgccttttgtcccgtaatgttcaaggccgggagaaagcagaatatattctcccgcttcaacggaaaaggcgttttcgtcttctgtaatgtagaggacgccttctttcacatacagcagatcaaacaccgggaagacccgtctcacatgggtttcgccttttttgaatactccttctcccgcagcgataaagaccgggaacggaggaactgtgaactcgagaaaggacatattttcggccctcctttttaagtcggatttttgcaagaagtttcgtttctctccctttttattataagaaaatggaggtacacttttaaacgttgattttttcaggaaaggggttaaaagaaatgaaacaagcgattttaaaacgggctgcgttcaaacaatcctctgatcacaaactctcattatacgcgctgacttggccgatatttattgaggtttcattatatatgtttatgggaaacgccgacactcttatgcttagccaatactctgacaacagtgtggcggccgtgggtgtcagcaatcagattttaaatttaattatcgtgatgttcagctttatcgcaacgggtacgacaattgtgatttcacagtttttaggatctaaacagaaaaaagaggcgcaggaagtggcttatgtatcaataggagcgaactttgtcatcagtctcgccatcagcgccgccatattttttgcggccgttccgctgcttcatgtgatgggtctttccaatgaattgatgccggatgccaaagtctttttgcaggtggtcggcgggctgtccttcattcaggctttgattatgacgttcagcgccattttaaaaagctacggtcatacgaaggatacgatgttcgttacgatcgggatgaatattttaaatattgccggaaactttcttgtcattttcgggccgctcggccttccggtgttaggcgtcgccggtgttgcgatgtcaacgtccttcgcgcggatcatcgggctgattgcgatgattgtgatcgtcaaaaaacgcatcggactcggtctgacatggcaaaagatttttcacgtccataaagagcacttgcgaaaactcctgaaaatcgggattccgtctgccggcgaacagctgtcttacaacatttcgcaaatggttgtcacttattttatcgccattatgggcgctcaggcacttacaacaaaggtttatacacaaaacatcaccatgtttatcctgctgttcggaacggcgatcagccagggcacacagattttgatcggcagatatatcggcgccaaacggtttgatgacgcttatgaccgctgcatgaaaagtctgtactgggcgcttggcattgccgctttgacatccgtgatcatgaccttgttttcaaagcagctgatcggaattttcacaagcagccctgacataattgcgacggcgagcatgctgatcgccatgacgatcattcttgagcccggccgttcatttaatgtcattatcatcaactcgctgcgggctgccggagatgcaaaatttcccgtctacatggcgatgatttccatgtggggtatcggtctgccgctcgcttatctgttcggcatccatttcggattagggcttatgggcatctggatttcatttatcgcggatgaatgggtcagaggcattcttatgtacagaagatggcggtcgcggatttggattcaaaaagggattgcataaacgcccgaagcttcgttatgaagccgggcgtttttttatgcttgtgaaagccgttgtctcatgtcaccgagctctgatcggtaatgtgccagcaaaccggtaacggcgggccttgagtataacggaaacagctccagctcttcagacgcctcctcgaaatacgcctcggcctcgaatgcgatgtactcccatacattcataaaagctttgttgacggtatggctctccagctcttcttccgtatagccgaattgcttcatcacctggcgcgggagacgctttttcgcccgctcgtccgtatggacctccagaagcacccgggtcagctgaatggctgctcctaatgaaacggctgcatggcggagtttctcttggttccggcgcgcacaaaccggcagcagcagcaggccgagggctccgcctgtttggcccgcatacatcagcaggtcatcaaactcttgatacgttactttttctctgtcagagatttggccggcgataaactcacgtaacggctcttcttcaagcgcaaattgctgccgcacatcggtgagcgcctcccacaaaaagccgtcggcgcgtgacccgttcagaaagtcttgtgccgcctgttcaaatcctccaagttcctgcacatcaagccggtcagcttcgtgaaacaaagcaagcaccgcccatgcggcccgcctgttttttggcggcagggatgagaaagtccatttatataaaggaaagtgcgcctcggcaagctgggcgcatgtttcgtattcggtcatggtatcactcctctgttttttagtgtaccatatgtttcacaataaaaagaccgatatccttcagcggaaaccggtcgcggcactgttattcttctatatcgatacggtacgcctcaaaccatgtatggatctgggcaagatgggcgatcagctgcgggcctttcatcagctggccgaaccacggaacctgaaaagatgaaccttctgtctccagcagcatttccagcttctttctgtcaagcagggtgtgaagcacggaatctttctgttgtaaaatcgttttcagccattctgtgaccccctgcgtgtatttcgggtgatgcgttttcggataaggactttttttgcggtacaaaatatcttcaggaagcagtccttcaagcgctttccgcaagatacctttttcccggctgccatgcattttcatttcccaaggaatattccaaacgtattccacaagtctgtggtcggcgaacggcacccgtacttcaagacttgcgcccatgctcatgcgatctttgcggtcgagcagatttgtcataaaccaaagcatatttaagtagaacagctgccgtctcgctttatctgttcccgtctcaccatctaacagcggcgtttccgcaatggtttcttcatatctcgcattcacgtattctctaagattcagccgtttttgccacttttcatccaagagcgtgaccctctcctcagtcgacctcatccaaggaaatccctcttcttctgccgctgtgtgaaaccacggatatccgccgaaaatttcgtccgcacattctccggaaaggctcacgacaaaatcttttttaatttcccggcagaaccataatagcgatgaatcaacatcagccatgcccggcaggtctctgacgagaacggattcctccagatgttcaatcagctgatcctgcgtaatcacgcacttatgatgctgtgtgccgaatgcatttgtcattttatcgatccacgggccgtcatcattcggctgaaaggcgctcgctttaaaaaatttgctgttctcctcataatcaattgaataagtatgaaggggatctctgccttgtttctcaaaatgagccgcggctatcgcggttatcgcgctcgaatcaagcccccctgataaaaacgtgcaaaccggcacgtcagatacgagctggcgtgtcactgcatcctgaaataagtaccgaatgtgagctgcggtttcatcgaagctgtctgtatgcttttcgctctttacattccaataacgccatatggacaaaccgtcctttgagaaagtgaacgcatgggcgggacgcacctcgtgaattcctttaaacaccccgcagcccggagttctggacggcccgagtccgaatacttccgcaagtccgccgctgtctgtgcgggctttcacatcaggatgagcaaggatggctttcaattccgacccaaacagaaaggaagagccgtgttctttataaaaaaacggtttgacgccgagccggtctcttgccccgaacagccgcttgcgcttttcatcccagatggcaaaagcgaaaataccgttcaagcggtccacgcactcctcccgccactcaatatagctgtgcagcagcacttctgtatcagaggtcctctcaaaacggtggcccctcgcctgaagctccttccgcaattcctccgtgttatacagctcgccattataaatgatggtgtacgtttcctcttgatgcgtgcaggccatcggctggcggccgccttcaatgtcaacgaccgaaagtcttttatgtccgaataaaacatggggctctccccagacgtttgaatcatcaggccctcgttttgaaagagtgtctatcatattgttcataatatgtttctcttggacgagctgcttttgaaaatcgacccaacccgcaattccacacatgtgatatcagctccaatcccgtttctgtcggtatcaaattcgtttctatcagcactttacccagtttatgcaaagaaacgcagatagttgatttgtcccactaagagttgtatgagacaagcccgatttggaaagaacggaagagaagaaacaaacaaaggagaccggcacggttatgaaacgaaaacagcttttctcagaaaaaaacaaatgggggcgcggcaccctgatgatagaggacggcatctgcctcatcgaaaacgatgaaggcgatatcctgcttgcagacagtctaggaaacgcagacgtattgatgaaacgcgacggcagatggcagccggcacggatttgcggcggcgcggccgaaatcggtgcagacaccatccccctgctcggcggggaagaaatccgttatgaaaaggcggtcaaacggccgctgttaaccttgctcgattcgctggacgatgaaacgttcctgctgtttctcagccatctgcacgggttcggcctgtctgtatatgattgcgtattttcctacaatcaggcgctgttttccggtgaaggcgtttcgttttatcacttctcggcggatgacgcacaatgcgccctgcagcatcaccgcggcagctcgggtaaacacgacagatttgaatggacggcatctgacgggcggcgctccattatgtattcagcggcaagacaagacggcaccgcgtaacaaacaggcggcaccttttaaataggtgcctcctgatgtatttagctttgtttttcacgctgattgacgcccggcgtttgctttgacccttcacagccgtagcttttgcggtagcaagagtgattgacgcttttggcatcctgcaaatctccttcgcctcatcaacatccccctgtcacggcatttctcattcagcggcacagttgcgcagaatgtatgcgcaactaaaaaaacccggatgcatccgggtttttcaagcgattgattaaaatacgtgaaagccgatcggcaagtgaaggccgagcagcactgtcaggacgagcacgataataaaaccgatccacagtccgccggttgatttgccttttttcttgcggatgacgagcatttccatcagtccgatggtaatgatgccgagcagcatttttccggcgtactctccgttccaattcgcaaaacggacaaaaagctcagctccggtcagaataataataatgtagaataagcgcagaatcatatgcgtaatttttgcgcccttcgcttttccggaaccgtacagcccgtagctgacaaacaccaggataagcgcaacgacccatgaagtaatatgccaatgtgtcattatgttcaattccccctatcagatcaatctgcctcacttatggtaccacaacaagccgatcggagcattatcaatcgtgcgaaagacacacaattatccgatttggttcgacagcgtgccgatcggttcaattgtaatgtcaatgcggtcccccggctttaaaaatttcggcggcttaaacccttttccgacaccggacggcgtccccgtcgctataatgtcaccggcttcaagcgtcatcccttttgacagcgtttcgattaattcagctatcggaaaaatcatgtcacccgttgatcctgattggcgcagttctccgttcacccgcgtttcaactttcaggctttgcggatcactgacggccgacttatgtacaatgaccgggcccatcgggcatgtcgtatcgaggcttttgccgataaaaaactgtttatgtttcttctgcaaatcgcgcgctgttatatcgtttacaattgtatagccgaatatatgatcaagcgcatgttctttcgagatgtgcgatccgcttttagatatgattaccgcaagctccccttcataatcaagctgctccgttacgtccaagtggctgtccactgtttctccgtgtcctgtaacggcagcgggggctttcgtaaaaaccatgggatgctccggtatatccgcctcactccccatttcaacggcatgatcacgataatttttcccgatgcagatcacgttctttgaaggtctcggaataggcgcgcaaagctttacgtcagacagcgcatacataaatgaacccgactcgtcattcggttttttcgcccattccgcaagctgtccggcatgcgcgacaaacttatctcctttttgaatgcactcgatcagcgaacccggaatcgtctcaagttcaaacaattttttttcagccttttgcagatctaagattttgtcatcatcaatgatcagaccgacaaattttcggctgttcagttcccctgtcgcaaatttcatgttaatcccccatcatttttaaatctggcattcctttatgtattcttcctccgggcgggaaattcctcttttaaacaggctgaaaataagtgtaaaagagtatcaaaaattgtcacttttttagtcatattgacgaaataaaaccttcttggccaaaatgggttatactattatcatcctatgttttccaaaataatcgagaattggagatcacacgatgaacaaaattgaagaaaaaagattaactttattcgagacagcgcaaaaattcggaatcaatgcgacggagaccatcaggtgcagccaggagctggacagccttttaaacgggtgccggggcgggctcatccaacaaacgaaagacagcgggctgaacccggccgcacagattgagcacggccgcaccgcaggaaaaaaagaggctttctcataaacgtgatatgtatataaatctgtatcatttatgtataagacccggcatgcgtaaagcgccggtgtttttacgtctaaagttttttccgctcacaaaaatgtgcatttgtcataagctattttaggcaggcagcccagataagctcctggagtgcagtcatgaaaatcttcacgaaaaggatgtgctcgtatgcccgcaattgtcggagcgtttaaaattaatgccgtcggtacgagcggagtcgttcatataggcgactgcatcaccatttctccaaaagcagaggttaagacatttgccggagcgggcagcttcaataccggagacaatctcacactgacgaattacaggaattcaacgaatgtgtacgataatgatgtaatcgatcagccgatggcaggaaacgcataaaggaggcgccgtatgaatttttacgtcaatcagtcgatccatatcaattacatgcgtgtagaatctgtcagcaattcctccatactgcaaatcggaagcgccggttcaattaaatctctttccaatctgtacaacacagggagttatgttgagccggcgccgcctgtcaccgcggggcagcagactgtaacaacaggggggggtcccggcacctcatcatttgtaccgctccagccgccaagccggtagttttaatgaaggaaacgagacgcgaggtgaatgtcatgtatgatcaatccgtttcatcctacctgcagaatttaaattctttcgtccagcagcaggcgcagcagattcaggagctcgaacggcagatgaaagaattccaaaatgaaatttcaacgctgaagcagcagccttctacaagaatcgatcggctcgagtataaatttgatcagctgaaaattgaacggctggaaggaacgctgaatatcggattgaatccgactgatccgaatgccgtgcaaaacttcgaagtcggccagacatctccgcaggtcggaatgatgcagcaggaacaggcgggccagcaaatgcagcaaatccgccaaaacgtcgatatgtacttgaatgaagaaatccccgcgcttttagaacagctcgaaactcagtatgagagcaggctggacgaaacgaacaaatatcatattattgaagatatcagaaagcagatggacagccggattcagtattatctgtcccatgtcccgaaagaagaaaatacggcgcccgcgcaatatgccgagcagattgccgaacatgtgaagcgtgatattgtcagggccgtcgagcactttattaagcacatacctggtgaaatgaaaggtgatgatccgtcatgatttttacagtgattaaccggaatattgaagtcggcgacatccggtctaccggtgtgtccagttcttccttattattaatcggcgacaccgattccgtctatctgtcttccatctttgacacgcctccggaatctcttattatcgggccttatgtgccgctggcgccggaataatgttaaagcgcatttcacgcctccggaacgccaaaatcaattcagtcgggattgcgagtgtttttcaagcaggcgatacgaatgaaatcaatatgcggatcaaagtattggccgatcagcgtagtcttgctgtatacagagatgatgaaggctcatttaacaaaaaagaataccagatttttcggcagccggccgtcatgccgttaccggaaacgggagtccaaagcgcattctgccatgaaaacccttcaattcgggtaaggaatgtgaaagttcaaggggtatcgtcagcgtccgtggttcaaatcggatcgacgtcgatcgttctgggagattcgcggctgaaacatattaggcagatcttcacgccaagctcacaatcacagcagccctgacatataatgacggtgagacttctataaagggtgtcgtttatgccagcaattaccggacctatagctatcaattccatatcgggcggagtcgtaaactttggtgattccttttacctttctccaaaaagctcttctaaatctgcgctcggttcgggagcaggcaataccggagatttcctgttattaaacaacgttgtcaatgcgacaaactatatagaccccgatgtcagcgatcaaaatgtggtcggaaacgcctaaaaagcagccgctctttcagaagagggctgcttttggttcagcgttattttcgttcatttgctttttttgtttttacaagcttttccggcggctgttttctgatccatttcacaaaccgcgcgagtttcgggtcacgacgcagctcttctattcccgtgagccttgccgcaagctcctgattcgtatagagcgcgtgaacctgtttatgacaagggatgcagagcattgcggtcggaaggaatgtcccgccttcttccttaggcgttaagtggtgctccgtcagccgcacatgatggcggccgcataattcacatgtgccctcggcagaatcggccatgattccttctcctttctacatgatctccaatgtgacccgggtgcctttcccgcccggttcggacggatgaacgattaattttttcggcagacgcgctctcagctcctgcacatggctgatcactccgacggataagttgtccgattgcagcttttcgagcgctgtgacaacggtgtctaagagcccttggtcaagagtcccaaatccttcatctaagaaaaagaattgcagcgggtattgcccccgcagctgaatctgggcggacaaggcaagcgcaagcgacagcgatgtcagaaacgtctctccgccggaaaggcttgatacgggccgtttgacgcctccgttcgcgtcatcacgcatgacgaaaccgccttctgaatcgactaatatggcataccgctgccttgtcaaagctccgagacgggcagaggcgtctcgagccacgctttccagctgttcttccgctaaaaattcgacgaatgtattgcctttacatacagactggagcttatcaagcctgtcaatctgtgtctgccagcttttcagttcggcttcaatctctttaaagcgcttatgctgtttttgcataaccgcgaaggcttttgcctgtgctcctttttcctccatggcggcgcctgactcagcctctgcctgcttcagcagagaaacggatgctgtccattcttcctccgatatccggcgctcggctaatttatcagtaacacggctgatatttgccgatagctgttttgaggtgtccaagaactcatctatttcttttttcatttcctctgcacgcccttgcggaagcagactttttttgacttggtccgggtcggcaaacccggtgtcttttgacctcacgcgccagtcgttttgcgctttctcaagggaggtctcagcatccctgagtgacatgagactcccggattcccggccttttgcgtcattcagtgattgctgcgcctgcttcagcgcgtcgaatagggactgttctttggattttaacagctgtaattcctgccgcaccgcttcaagctttgcggaaattgatgtttcttcggctgctgttccgagctcttgttcatatccgtcaatcacctgctgcaggcgctcagacgcatagtgaagctcgagccgttcccgttcaagccgatgcttcatctcctgcaggcgttctttctcctcttcatgttccttgaggaatgcgatgcttgtttcaatgcgcttctcacattcttctgcctgcctgtccttctcatctatcgaagcctgccaggcgtcaatccggtttggcggaatatcaccgcagacttcattgtactgattcaatcggctttctgacagcgattcaagctcttctaatgaatgtctgagacggtcggcttctttttcctcgtagcggattcgttcggcaagctgctcagcttgtttcaccgtctgctgatgcgcgctgatcagtcttgtgaccttctcttttaccgacagcatatcctgtttcatttgtttccattccaagcggacggcgctgaacgcttcatcaagcgggcgtccgctgatggaggaagcggcttccagctccggaacccggacgctttgcagaaacggacattcttcggtaaaacgccccgactgttcttctaatgcaaccttggctgtcagcacttcctgagaaagagccgccgcctcagaaagcagcgcttcaacctgctgcagctgttcctgtacagccgtatcaggcgagaatgtttcatgagcggaacgcgggcggtcatgctgcgtcgagccgcatacaggacaaggctttccttcgattagtttttccgataattcttttgttaatgcagccgttctcgcttcctctgagcgcctgcggagatcggcttgcgttttgtcagcccgttcggctgcggctttcagtgaacgttccgtttcacagaccatatggtaaacggtttgaagcgtttgataagcgtgcgtaatatcttcctcttccgttttcgctttcgctgtgagcgactcgctttctccgttcagcttctccacgtttttcagctgcgttgtcagattggcccgttctttcgtgatttgttcctgtatctgctgaaagcctgccgccagctgtgcggcggtctggcattttttccgttcatcggcggtcacttgaactgctttcagctcttctttcagctcattctgcctgttttggccgcgggtcaggcggtctttcactgcggccagctgtttcgaggcggcttcgtattcttcctcttttttgctgtgttccgcatttgttttttccgcttcttttttcgcttcaaacagtttttgttcaatggctgaaagtctttgatacagctcttcttccttgacaagcttcggctcctgttcggccttatgggcccgccatgcttcataggcttcattttgccgggtaaatgaaacggtttccgcctctgatttccgtttggccagttcgtgttcccgttcggcgcgctgcttccggcggacggcttctgtgtaacggtctgcgtacggctcaagggcgagagctgtttccgcctctttaagacgctcagtcaaatccgtgatgtacgggcgtctttcctcaagctttttctcccggcgctcatattcatctctttctgtctgcaggttccaaatttcctggtgattctcaaagcgctcttttgcccggacccgtttcttctcagcttcttcaagccgttcgttcgcttcgtgaaactgctgttcagcctgcttcagcgcatcttctcctgcgtctccgaggccggattgttcggccagcatttcattttttttcgctgccgcttcctgcgcccgccgccgcaattttttgacaagcctgtccccgtactgttccagattaaacaggcgctggagcatatgtcttctttccgcgcctttaagcgacagaaactcggcaaactttccttgcggcagcacgacggctcttgtaaagtcgtcaatggtcaggccaagaagctcttccacctttttgttcacttcattcgctttatcggccagcaccgtttgttcgtctttgatttcaatcaagcggcagagggcggtttttactttcgtttcatccgttctcttaaaaacgcgctcgaccttgtaggaaacccggtggccggattgaagcgcgaatgtaaatgagacggcgagctgctcttcggcatgattcaggatgccgtgcgtattatttgcggcgcgctccacttttccgtataaagcgagtgtcatggcatcaaggatcgacgattttccgcttccggtcggcccgaaaatcccgaacaccccggctcctgacagtccggcaaaatcaatggtctgttcctccctgaagctgtggagcccttttatcgttaacagaatcggcttcatgtcgcatcctcctcatcatctgctgacgcaagctctaaaaacagcttgaccatctcctcatccggcacgccgccgcccgtttgtttttcataaaacttcttaaatcgatcctcaattgatgtgtgtttcacttcaatccggtcattgtcggtctctttttcttcaaaaaccggcctgatatggataaagccgggatgcgcctttctcagccgatgaatttcctcgagagaaagctgatccgtcaaatggatatcaagatcgatccaggcattccggtcacgcccttcatcaagccagccgtgaacctcgctcagcccctgcgctttccatttgacgagcggtttaccggaagacaggaaaatctcttcccacttcgcttctccgccgggcttcgcttctaccaccgtcaccgatttggcataaccggcttctgaaaagctgtatgccagcggagagcctgaataacgggcagccgtcttggcgcgcttgatcgtttgcggacggtggagatggccgagagccacgtaagccgcatcagccggcaggctgtcagcggcaactgtgtaagcgcccccgacttcaatcggacgctctgaatcagtctgatttccccccgcgacataaatgtggctcgccgcgattttcacggcatcgttccggcacagtccgcacatgtgagcaaacgcctctctgattttcacatcgtaatgatcgcgaagaagcttttcctcaaacgtatcagaaagcacttcgtttaatctcgcctctgacggatatgccagcgcggctacggctaacagctcgtccgtcgacggcacctcaatatgcacgggttctgtccgcggatagccgattaaatgaatgccgcgctcatttgttaacggagaagccgccgccagcctgtcgggattgtcatggtttccggcaatgacgacaaccgggcgctttccgccgtcagaaagcgcggaaagactttcgtaatacaattgttcagcgagcgcaggcgggttgaccgtatcaaatacatcccccgccataatgaccgcatcaatattttcttccttgacaatggtattcagctcttccaatacctcggcctgctcgctcagccggcttctgccttccagcgttttgccgaggtgccagtcagctgtatgtaaaatgcgcataccgcattcacctcactttttgatagaaaaaaagatccgctccaaaaaggagcttcggatcttgttacagtgtaagaacgtgacctccatcgaagaaatagagcgcacgccctttcactttcgtttttgtaatttgttcaaccgcttttgtatacaattcgatttgtgtttcataccttttttgcagaatcggagccgcgccttcaaatccgttccggaatttcccctctatccgatcagttttatagtccagcaaatagagaccgtccgcagtttcatagaggcagtcaataatcccctgcacgagcagcggttcaccggccgtttcggcatccttgtacacctcgccggccggaagcgccatactgaacggcacttcccggtcaatccgcagcgccccgagaaggtctttcccgatttcagttccgaaaaactggacaatttcttctatatcaatagcttcctgctgttcttctgtcagcagctctttttcgtaaagcatccggaccgtccgctccgcttcttcggcagtcggaacgtgcgtcagcggtatgtgctgcatcaccgtatgcatcgccgtccctttttcggcggctgtcagcccttttttcatcataaaaccgggacgcctgtataaaagcgtgtctcctgacggtttgatgagagagcggccgctgtattcatcctcgtattcttgctttctcttcagctcagaaactgactgcttcgttctgatagccgtcagctctcggtacggatattcccattcaagcagacggcgcgcctgatcatcaaatgaaaacgaatcaggaatcggctcgccctgctgaatcgctttgagacgtttgctcttttcttcagcacgttcttttggattctcttccagcaattcactttgctgcagcatccggatgtgaaaacgcgacgggtcgcgcgcgatatcctcagatgaggaaagtcccggcgtcctgtgcgcctccatgtcacggtggcggatgagcgccggcccgataaagtccaaataagatgacgcctgatagcggtcgaattcagaaagaagccaatcggcccggtctgcttgcgcctgccatttggccagctgtttttcccggtttttgcaggaaccgacgagaaacagcttttccttcgctctggtcagcgccacatacaatacgcgcaattcttcggataagagctctctgcgcatctttttcttcatcgccacaagcggaagagtcggatagctgattctgagttccggatggatatacttcgtgccgaaaccgagctctttatcaagcaggtatgatttgttgagatccatcatattaaaacttctgccgagtccggcggtgaaaacgacggggaattcaagtcctttgctgctgtggatcgtcatcagccgaacgacatcctcctgctcgctgagcgcccgggccgtccccagatcatcgccgcgctcctgcatccgttcaatgaaccgcaaaaagcggaataacccgcggaacgccgtcgcttcgtacgagcgcgcccggtcatacaagacgcgcagattggcctggcgctgctttccgccgggcatgccgcctgcatagtcaaaatatccggtatcgcggtatacttcccaaatcagctcagacaccgaatgattcgtcgaaaatgaccgccacttttgcagactgtcataaaaggttctcagtttttgatacagttcatcatgtctgtcagcgttcgctatatatgctttcagcgcttcataaaacggcgcttttttcttttcaaggcgtatcagcgcaagttcattttcgtcacatccgacgatgggcgagcgcagcacggaagcaagcggaatatcctgatacggattatcaatcaccttcaagactgaaagcgccgcagccacctccacggcttcaaagtaacccgacgtcaaattggcgtacaccggaatgccctggtttttcagctcttccattaattgcggcgcccacggcatggagcgcagcaaaattacgatatcccggtactggatattccggtgtgtttttgttttgccgtcatataccttaaacggagatgagacaagctttcggatctccccggctatcgctttcgcttcccagtgcacggtttcaaagtcttcggcatcctcggagctgtctgcgccatcagcgctgtcaatgagcagcagttccgtttttgccgcgtcattcggcggatacgatgcgccgagcttcaatgccgcctgttcatcgtagtccacttcgccgatttttccgcccatcagctgcttaaacaagaaattcgtactgtccaaaatatcggagcggctgcggaaattttggttcaggtcaattttctgccccgcgcctgccccgctttctgtaaaccttttatatttcccgagaaacagcagcggctcagcaagtctgaaacggtagatcgattgtttgacgtcgcctaccataaacagatttcccgcctcttcattcccgcttttaacaagctgcaggatagattcctgcacaagattggtatcttgatattcatcaaccagaacttcatgaaactggtcttgataataaacggccgcttcgctcggcacccgccggccttcttcatcaaccgcagttaaaatcgccaggcagtaatgttccaaatctgagaaatcaataattgatttttcttgtttcgccgcttcaaatcgttttccgtacgatatcacgagctgaacgagcgtttcgatgacaggcttcatatctgctaaactctttaagtgatcttgcggacttcttgtaaaataatcggtctttaccttttcgatcagtttcttcgcgccgtttcgcaaatcggtcgcttcgtccaaaagcgctttgtcaaattcatcaccctttaccgccttcgcccgcttaaatgagactgcgggaacccgttcatacagcgcatcgaagtcatgccggcagctgatcagctcttctatctgctgaaggtcatccagaaaattatcagcgcgcggggccggcccgccgggcgcttttgtcagttcaagcgccttctcaagcttttgttttgccccgaagagcgccatttcagcatcttctttcacatactggtaaaacggaagctcttccattttgctttcttccgtcacgtcatacaggcggacaaagctttgcagccatacttccgggtcaggatgcgaccgggaatactcgtacacccgtttgacaaggtcttgaagatccagatcatgcctgtctgtcgtatatctgtccgcaagctcaaaaaacgcctgattcccttttgcgtattcatcttcaaacagctcatcaagcacttcgtctccgagcaattcgccttccgtctggtcagccatccgaaaaccggggtcaagatcaatcatataataatattttttaagcacttgcagacagaaagagtgaagcgtcgaaatgctcgcccgatttaagagagagagctgccgtctgatatgcagagatcccggatttttggcgagctctttttctaatgcttccgcgatccgatgcttcatctccgctgctgaggcgtttgtaaaggtcaccacaaggagcctgtcaacatcaatcggatcttcttccgcggttatctttctgatcatccgttccacgagcacggccgttttacctgatccggctgcggcagcgaccagaatatcgcggccggaagaaacgatggagctccattggtcatccgtccatatgctgtctttcggtttaggaatttgcatcatcatccgcctccttcttcagccaatccagtatggtgccgtctttttccgctttcaggctgcggtattcattttccttaagcgactcatcaaactggcacaccgattgaaacgcacagtacgtacaaggcgtcttatctttcagcttatacggggtaatggacacaagcccgtccgttatcgcttcgcccgcctgttcaaatgtccgccgcacatggtctgtcagcagatgaaaatcccgttcgctgaccgcggctgagtcggatcttaaagaaccgtcctttttcaaaccggcattgacgatatttgaacgcccttcctccaaagtcgtgtccatcaggctgatcgcctcccggtcaccgaggagaaggcctttcattttaaatttcttaaaaatttcctgctcgatttcatcaagccccatcggcagactggcctgaatcatcggatcatgaatatggaaatacaaaacgcctgccggggtcgctttcataccgagccaatcttcggaatgtgtaatcgataagtcaagatatgtgagcatttgcagagcgagcccgtaatacacctcagccagatcaagccccctgtcgcttgatttataatcaacgattctcagcagcaggccttttgaactttccgctttatccacgcggtcgatccgtccgacgagttccatcgtacagccgtttttcagcgtgaaagtgagcggaggcagcggcccgcttccgccgaaaccgagttcaagaccgaccgggacgaaaccgctcgccttcgcatgctcgcttaatatgcctgaaacacgcgtgacgatcttctgcagtttttccttcacataaaagtgtctgtttgagctgagcagaatctctttttgcagctttggcgcaagccgttccaccgcttcataggagaaattccggcactgatctttcgtcagatcgcgccattccagcttctgctcacgaagccggtctgaaatcagcttcaggctggagtgaaacagctggccgatatccggcgcgtccagcttgaaaaactgccgctcttttaattgaagcccgtgagatgcaaaatgagagaactggcaggcattaaacgcctccatccgggagacgcttcctttaatatgctcgccgtaaagctggcgcgaaacaggccgttctagacgcttcgcctcattgcggaaaaacaagcttgaaaacagctttttcgcacgccggtgatcaggctctttcatcagcacattgtatgcgctccaccatacgtcactgatctcgtactctcttgtccacagcctgagctgacttgccgtatatgtctgagccacctgtttattgacgagatactgaagctgctcttcttcgcttacctgctcgggatcagccgctgacagcttttcctgatgatcgggaaacagctcgccaagcctgtttacaacgattgacggcaggagcgtttttccttccgcatcggcaatcgggtatgacacataaagacggtcagacggactcgacagcgccatatagatgagaaaatgctcatcaagcagccgctcacgccccgcggaagacagctccactccgactgctttcagccactccctgtcatcatcagacagcacgccgttttcatccgggcgcgccggaagaacgccgtcattggcaccgatgacgaatgtgcaggacgtgccgtacattcttgagagatccatattccctacaaatacttggtcaagcgcgggaggaattaaagaaaaatgaagcgattccgttcccgtttcaagcatttgctggaacagcgccaaagatatttcatcttcacccatcatgccggtaaactcctcgagaagctggataacggcatcccacgcctggccgtgctgctgcgcttcgatcatgtttccggcctcttcggcccgctgccttttccggtccagcttcaggggaacatcggtatcttccaaaaagagataaagagcctccgccatgctttgaaccgttttcgcttttttcatccggttctgaagccggacaaggggtgcagctatccactctctcgtctcattcagcatgtgttccatctctatttcctgatccgtctgcgcgaaatcctcatcgagcgatacgaagcgcctgtatacaaaccgctcgccgttcgtccagcgctcccctttaatgccgtaggcgatacagtaattttcaagctgatcaacctgctctcttattttctgctccggctgatcaagcgggaataacagttcggttttcgcacagcggaacaccgcttcatatctccagttccccttcacgacatccaggcttgaacggatgaattcaataagcgggtgatgctgcatagaagcttttccgtcaataaaataaggaagcccgtaatcggcaaacacttccttcagcaaatctttataatcttccggctgacggatgagaatcgccatatctttgtaccggtatcctccatcccggacaagtgattgaatttcccggacaataccttcaagctcagctcttctgttttgcgcctgcatgacggtaaaagcttcctgtccgccggtatacgccgcggcgggacgcacatcgtactgcgactctatacaggcaagctccggcgcatactgatgccgcttcgtgccatgcagttccttgcaggaaatatcggcattcaattcctttgccgtctgataaagcttatagtatgtgcttcccgtcattctgaacagatcgagctcatccggtgcctgttccgccgaagggctgtccgccgtcagcgagaatgtgacatgttcagcatgcatgatcagctgctccagcacccttaattcctgcggcgtaaattgatagaatccgtcgacgtaaacacgggcgccttttacaacgtccgccaaaggaatctgctgagcgagcagcgtcaaataatcctctgaatgcaaatagtgtccggcgaggcttctttccatctgctgatataaaatgcctaaatcatgaagtttttcagacagcatccgctctccgcgatattctgacgccgttccgctttccgccatgcggcggacgtcttcaggctcaatacagtaccgcttaaactctgtcagcatccgttccacctgctcagtgaatccggttttgtcactcgctttttgatacactttaaactcgtgcttatattcttcaatcagtttccttaaaagcatctgcacacccgtcgtcgtcacaaacgggcggttcatgcccccggtatgctgaagcacgcgccacgccaaacgcgaaaaactgaacacttgagcgcgtatcatgccgccgatatccggcgttttagcaagctcatattccattaaaaacgtcatttgatccgggactagaaaaatgatcggtttcccgaacggctcccggcgcagttcatcttgaatgctgtcgataatcagcctcgttttcccactccccgatctgcctactaaaaactcaacacccaaattaaaagacccctctctttttatctttctacattttatcgaaagttgacgaaaatgaccaatctcatctgctggtaaaaacgggatgactgttttaaaaaatatcgtttttgaccaaaataaagaaaaaaggactaatgatgatgtcagaatatcccgaagtaattgtacggacggctctgtcgttcagcattctgtttatcggcgcccggatactcggtaaacaaaccatttcacagatgacgctttttgatttcattgcggccatctcgctcggcgccatcacggcaaatctgtcgtttaatacaaagctgccgattcattatcatgtcattgcctacattattttcgtggcaatcatttaccttgtcgcatatctttctatgaaaaacagggcccttaggggtttctttgcaggcaaaccgaccattatcattcaaaacggtaaaatacttgagcataatatgaaaacgatgcgttataccatcgactacttgaaccagcagctgcgtgtaaatgacgtatttgacatttctcaggttcagactgccatcattgaaacaaacggcagcatgtcagtggaggtcaaaccggaatttgcgcccgttacaagaaaggatctcggcatctttgccggacatgaaaagaactttgccgttgagctgattatggacggccggctggtgatgaagaatctggaagaaaaccacgtatcggaaaaatggctgagagaagaattggacaagagaaacctcaaaccggaagacgtcgtatacgctgtgcgcggaagcaacggccggctttttgtcgacacatacgacgaccatattacatcgccgctagatcaagaataaaaatgacatccgcacatgtcacgggctgccgccgtataataccctataaacatccgggggtgagtccaatgcacgagaatttttttcattatacagccatctgcagtgacgattctgtgcttatcaaggatctggtaaaatccataaacggtgaatacagcgctgtgatttgctactcaatattagccgaaaaagcgccgaccgcagaaatcagaagacgaatcgaacatatcagagaggaagaagtgcgccacctgcacgctttctcttcactgtatacgtcaattaccggaaaacagttgatgccgaaacagacggagcattgtccgcacacatacagagaaggactgagggcggcgttttatgatgagcagaaaacgaatgatttttatttgcaggcatccgatagagcggtgcatccggaagcgaagcggttatttgcccgcacagcatttgacgagcagcgtcatgccgtctggtttttatacgatatggcccactctccttcccaccatacagggggaacggtatcaaacgcgccgaacacaagctacaccgaggtgaataccggcaaataacggttcaggcagatcacgctcccccgccgggagtcttcagaccgctgacaaaccccgttctttcaacatgagagaatggggtttacttttcgagccgttttatactccctctaaacaatggataccttcttcattgtataatcagcaaaaaccctttataataaaataaaccaactggtcggtttttaaggagccgaacctcatttggcggaaaggatctgtgtgaagtgacaaatacaaaaggcggtgccggaaagagcgaaaagacgaagaacaggctcgtatccgcttcgcgtgacttatttgcaaaaaaaggatattcagaaacatcgattcgggagattttagaggcggccgaaatcagtaaaggcaatctatatcaccattttaaaggaaaagagtttctgtttcttcatatcatggaagaggatcaccgtgtgatgatcgagacgtggagggaaatggaagctgatctgaaagatgctgccgaaaaattgacgggctttgcggagctgctcagccggatgagcatcaattacccgcttatgagagcaagtgaagagttttatgcgagtgcgtttacgtcagaggaggtcgtaaagcggctcaacaaaattgatattgaatatgacgatgtgatgagagagatcttagaagagggaaatcaagacggcagctggtccattcatcatgtcgaatcaaaagtaaaaatcctgctatccgtcttctacggtttagatgtgttatataaaaacgataccattcagcaaagaatcgaattgcaaaaagaagccatctccgtgtttattcacgggtcgatcagcgctgataaacagaatgacagctgacaaaggagaaacaacatgcaaaaaccgatcagagaacaaaaggctgtactcatcatcttattaagcaacatatttattgcgtttttaggcatcggattgatcattcccgttatgccgctgtttatgaatgtgatgcacttgacgggcagcacaatgggataccttgtcgctgccttcgccgttgcgcaattaattgcatcccccattgcggggagatgggttgaccgcttcggcagaaaaatcatgattctcgccggactgtttttgttcgcattatccgaactgaccttcggattgggcacacatgtctccattttatatttcgcaagggtgctggggggcatcagtgccgcttttatcatgcccgctgttacagcgtatgtcgcagatattacgacggtgcaggaaagatcgaaggcgatgggctatgtatctgccgccatcagcacagggtttatcatcgggcccggcataggaggatttattgccgatcacggcgttcgtatgccgtttttctttgcggcgggaattgcatttatcgcagtgatttcctctgtctttatgctgaaagagccgttaactaaagaagaacgcgcaaagcagctggaaagcgtcaaagaatcaaccttcttaaaagatttgaaaaagtcgattcatccaaactacttgatcgcctttatcatcgtttttgttttggcattcggactgtcggcgtacgaaacggtattcagcttatttacaaaccataaattcggcttcacgccaaaggatatcgccattattattacgttcagctccattgtggcggtcctcattcaagtactcgcgttcggaagacttgtcaacttcctcggggagaaaaaagtcattcagctttgtctgatcatcggcgctgtgctggctttcgtttctacggtgatgtcaggatttttgcccgtgctcgctgtcacctgcatcattttccttgcgtttgatttactgcgcccggcactgactacttatttatcgaaaatcgcaggaaatcagcaggggtttgttgccggtatgaactcaacatacacgagtttgggcaccattttcggcccggctctgggcggtattttatttgatatgaatattcacttcccgtttctgttcgcaggtgtggttttatttctcggtctgggattgacctttgtgtggaaaggaaaagcgggcgaggtttcggagtagggtgcactcacccatctccggagctttttttgcgtttgcgataagaaaaatgaatggattatgagaaataattcattatttatttatctcaaaatctatactatagtaatagtaaggttaacgagcttaacaatttaatatgaatgtttcaggaagaagggttttcattgaagaaagacaaacatctccttacggatatctggtttattctcatcagtgcggcaggggggtttcttctttcgcttacagggatgtcgatcgcctggatgctcggaacgctggccgccggctgcatcctctccatgacgaggccccgctggctgttcatggcgcctgacagaagagggattcaccgcagatggcttgcagcgggtcaaatgatcctcggcatcgaactcggccagaaactgaacctgtccgttctgtcggttttacgggagcattggcttccggtaggcttcatgctgattttctctatcgtgatggcgcttgtttccggatatgtgctctttcggttcagccggacggacatgatgacaagctttgtaggcacggcgccgggcggtttatccgccatgcccggtatcgcccaggaagtcggcgcaaacaccgcgattgtaagccttattcagctgacgcgcgtccttttggtcgtcatgacaataccgtttctcgtcattttcttatttaccaaacaaaacggtgcggctcagtcatcagccggagccgtttcggcaggcgcttcacatccgggccttattcccgtcttgttaacggccggatttattttggctgcctggcttgcaagcaaaggcgcaaaacggctgaaatttcccgccccttggctgctcggcagcatgatcggcgttgctgctgcggaaatcggcgtgtccgccttggcgggcaaagacatgctggcctggtggccgccggaagcgaaccagctgtcacaaatttttctcggcgccacaatcggatcaaaaatgtacaaaagcatgttcaccggcgtgacgagagtgctgaccgtcggatttatttcttccgtcggattaatcgccgccatgattctgagcgcggttgcggtttctaaattaacgggcatctccatgattacatctgttctcgccttttctcccggcgggatcgccgagatggcggcgacttcgatcaccctgcacgaagactcgactttcgtcgtcgcggttcaggtcatccggatcgttctcgtcatcgccatgcttccgcccttctatcggctgctgcaccacctttctcagctgaaacgggcacacggtgaaagaggccgggcagaaagaggaacatgagccgaataaaaaaacacgcatccatatgcgtgttttttatttgaacagctctccgccgccatttacagaccgccagtttgctgaaagatcacggaacagccgttcagcaaataacagttcttcatctgtatagcggtctaaaaatgccaagagccgcttttttatcaattcatgatattcatgatgaagggaatgcagctctttcccggcaggagtcagccggaaatagacttcttttttattgtcgctcagccgggtcctgcgcagaaagccggcttccaaaaacttcgcgcagctcctcgacacggtcggctttgtcgtcttcattttttccgctattgacgtgacattgatcggttcatgatctccgatacacgacaaaatgtgaatttccgtcaaggtcagctgtaatttttttccgttttcttcacggagttcgtccatccgtccggccaacgacgccctgatgtcctcctgacacctctcctgctcgtgaaaaatatctgtcagcccttcaagaatcatgtgttttgcatggtctggctgtcttctgtccaactgctgaatcacccttccgtattgattgtttcttttactataacgttttgttacacaagaaacaatcacacaggcgcataaaagggtatcagatgaatccccatctctccaaaccggtcagaacagcttcttccgcttcacgtcccgagccgccggctgcccatgccgcgtggccgtccggccggattaaaacggtgtggacgtcatcccaatcggcacgtgtttcagcaagctccgcactgacagctgccacgctgtccgtatcaataccggcgggaatgctccctcttaatgacaaaagcacaaaggcgcccttatgaagaaaatcatacagccgggccggccgcccgtcatgaagggtcaattcgatatccggcaggcgttttccgttcagggtatgcggcggcagctccgcatccggttcataatgcagatcaagcgcggatacttttcccgccaataaacggttggactcctgaaaatccagcaaagcggtcatcgtttctcttaatgccatccccgactcggtaaaatccatgagctttatctgggtttttatattgtgcaatacttcttttcctgtgctgtgcctttcctgatgatagctgtccagaagatgaggcgccgctttccccttcatttgcgccgccagcttccagccgaggttgaaggcatcctgaagccccgtgttcagcccttggccgcctgcgggaaaatgaatgtgcgccgcatcaccggccacaaaaacccggccggagcggtactgctcagcctgacgctcggcattgccgaaccgcgacatccataccggatcactcaatccgaaatcagtgccgcatatccgccgcaggtcttctttcagctcattttcggtgaccggctcttccttccgcttttgcggagcgtgcggagaaacgatgaggacgcggaaaagtccgtccgtaagagggacaatcacaaccgatccctccaggcggcacgttgaaaaaaaggaagattcgggcggatgtgtcaaagcggcatcacagagggttcctgttaagtcggcatcagtgcccgaaaaagcgatgcccgcctgtttcctgacaatgctccccgctccgtctgtacccgcggcatataagctgtgaagagtgcggataccgctttcgtcccggaacaccgtctccactccgtcatccgtctgggtgacagccaccgcttccgccccgcggatgatgtctgcgccgagacttgatgcatactcctccaaaatccgctccgtttctgcctgaggcagcattaacgaataattctgcttcgtatccagccgagaaaaatccagccgtgtatccagcatggaaaaatggccggaagacaccttcgtccctttttccaaaaagcgttccaatatgcctctcatggcaaaaagctcaagtgtgcgcggatgcatgataagcgctttggaatatggcaccgtcttcttcaatcgttcaataacagtcgttttcactccggccagcgccagttctgatgcaagcataagcccgaccggacctcccccgataatggcagcctgtgttttcatctcatcagccctctttcatattttttgttacgcacgtaacaaaattaccaaaaaataaaacgcctcctttttgtttcgcgcgtaacaattttcattatagtcttccctctgcttttttacaatcatttccgaaaaaaaagacgccgtttacttggcgtctgattcactgatgactccgacaatgtctttatccttaatcggaccgaaatgacggctgtcgaggctgtatatgcggttgtcgccaataacaaagtattgtcccttcggtatgcttttgcgcccggtcgtttccttcagcgtataatcaccggtcacatggctcccagcggacaatgatgactttaagggttttaaaaacggttccgccacccgttttccattcacatacagctgatcctccctgtatgcgattgactcgccggggagcccgatgacacgtttgatcagcactttgcggtgcgggcctttgaacaggacaatatcgaaacggcggatcgttttgtaacgatgggaaaacttgttgaccatcagctcatttccttgtttaaaggtcggattcatgctgattccttcgactttataatcaataaaaatggcattctttaattgtatggccaacacaacgataagcacgccggctataaaccaaaatcgttttttcaagattcctgtctccctccgtctttctcatgctgactgattctcatctgtaaacgccgttcgatatgctttccgacataccacagcaccgcgatcaccattatggcgcccgccatcctgaaaggctgtgtcatgagtgcgtgaagatcatacccgataaagctgatcataaagatcatgaccattttccccatagcggctgctgatataaactgcagcgcccccacccgtgacaggccggcaacgatatgaaccgcagcggacggcgtaaaggggaagcaaagcaaaataaacagcggaccgaaaccgtgccgctcaacccagagcatcatccgccttatggtctgatgcctgcggatgaaaccgaaagctcttttctgtccgaaacggcggacggcataaaacatcagcatcgatcctgccgcagacccgagccatgacagaaaaaaaccttcccacaaaccaaatgcattcgtattcgccaccacaaatacaacgagcggcaaaaacggaagaaacgcttcaataaaaggcagtgcagccgcagccgccgggccgaaagctctatagctttggaaccattccgtcagctgttcctcagtcaaatatgataaaaattgctccaacgtttatactccttaacgagtttgtctatccttattctacacattatctccaaaaaacgaaaatgtttacgagattttccgacttgaaatatcgtgtaagcgagtataaaataagaacaaacgttctcttttttaagaaagaaggagtatttatgcctgacatccggagcagcacccgcgatctcatcgaaaaagggctgtttctgcccatggcggctgccatcctgaaccgggacctcgaagcgcttgattcgtgcccgttcaaattaaaacaaccctataaacagcttatcagctgctctttaaaattagcacaaaaggatttgagtgatgttcgaaaagagttaagaaagcgtaaaattaaaatatacgaagcggaaagagacgaagcatttacgctttatatatgcaccattaacggctatgaagaaaaacaccgttatttcaacccgagaatacgggaacaggtaaccgccttattagaatattacctgtctcttgcgaccatttaaaaagcagccgggactgcttttccttttcaactgataaatttcagactattcacactatacattcgacatgattttctttataatcgggacacgctgttttcaatgaaaaggaggaatgttatgaaactgattcatgttctcgccgccctgccctttttcggaattctcgccggcattccatttgccaaccgggtgacgccttatgttttcggaatgcctttcattctcgcgtatgtcgtcatctgggcggtgctgacttccgttctgatggccgccgtttacaaattggacaaagaaaacaaggcgggtgaggcggaatgaacgcagcatttcccgtaatggccgccgtgctcctgttttgtgtatatctcggaatccgggcccgaaaaggaaaacatatggaccttgaacaatggacggtgggcggacgcggcttcggcacgatgtttgtctttttattaatggcgggagaaatatacacgacctttacattcctcggcggaagcgggtgggcttacggaaaaggaggccccgccttttatattatcgcgtacggctgccttgcctacattttgtcatattggcttctgccagccgtgtggacttacgccaaacaacacaaactgatgtcgcaatcagatttttttatttcaaaatacaacagcccgctcctcggcattctcgtatcgctcgtcggcatcgcatccctcatcccctatctcgtcctgcagctgaaagggctcggattaattgtttcagcaacgtcatacggacagattccgccctcagccgctgtctggatcggcgctgtctccatcacgatttatgtgatgatatcaggaatccacggttcagcgtggatatcagtcgttaaagatatcatgattttaggcatcgtcctgtatttaggcatttatctgcccattcattactatggcggatttacggagatgttcaaacaaattgacgccgcaaaacccggttttctcacgctgccggaaaccggacagagcgtttcctggttcagctcaacggttttgctgaccgccctcggcttttatatgtggccccatacatttgccgcttcctattcggcggagcatcctcgggtgtttcggaaaaacgcaatcatcatgcctctttatcagctcgtcctgctgtttgtcatctttaccggatttgcggcgattctgcaggtgcccgatttaaaagggacggacacggatctcgcgttattaaagctgtctgtgaaaacctttgatccctggtttgtcggactgatcggatcggcgggcattctgacggcgcttgtacccggttcaatgatattaatggcctcaagcacgctgttcgccaaaaatgtgtacaaagccattctgcccggcacgactgacgaaaaagtctcacggctcgcaaaatacgccgtacccgtcatcgcgctgatatccgtatattttacgctgaaaggcggaaataccatcgtcaccttgcttttaatgggctacagccttgtcacccagcttttccccgccctcttattcagcctgccgaagcggcgtttcatcacaagccacggcgcttttgccggcataacggccggggtcggaacggtggccttcattacgctgaccgaatcaaccatcggaaccctctttccgtttcttccgcagatcgttaaggatatgaatacaggcatcatcgcactggttctgaacattgccgtcatgtttgcagtcagcgccgcagtcagaaaaaaacaaatcagcgcagccgaaaaggcggcttaaatggtaagatagcggtaagatacacgaaaggggaaaaacgcatgatcatgacaacgaccgaaaccgtcgccggaaaacagattacggaagtgaaaggcttggtgacaagcagtatcgtccagtccagacacatcggcaaagacttgcttgcaggcttaaaatctgtcgtcggcggcgaattgaaaagctatactgaaatgctggaagactccaaaaaagcggtgaaagagcggctgatcagagaggcggagcagctcggagcgaacgccatcgtcggcctgcggttcgaactgaccgcaggacagaacacatccgaattaatcggatacggaaccgccgtcaccgccgaatccatttaaaaaaacaagcctctttaaagaggcttgtttttttatttctcacatgcgatatagtctttatctcggtcaagtcttttatttgcattgtaaagcgcttttgatacatacggcttgtactttgttctgccgcccttgtttttcactttcgacgatttggccacgccgcccttatacaccttattcagcgccttgcagttttgatacgttttcacctttgttttcgcttctgccgtctgccccgctccgtatgaacatccgaacacaagaccgaaagacaaaagcacagctgccgtctttttcatttctatcctatcccctctcctgagttatgcggtattgctgaacatatcatagttcaaataatatccatttacaagataaataggaaaatagttttaatttacgtccgcccgtatatcttttatggaatttttcccaaaaccttttataatatgaattgatagcgcgatctgactatgatgataggaggagaaatgatgatgaaaaaagggctttttgcgggtgtgctcactacagccgttctattcggcacatgtacggcggaaattccgggggtgatcagccccaatacggcggaagcggcgtcccagctcagcaaaggaatcggcggaagggcctacctgaacagcacgggctcagttctcgtcacgaaaattcagcttccaagctcaattcaggtgtcaaatgggacagcctatatttactcaggatttaccggaggcacagaggctgatatcggacttcagtacagtgacacctatcatgtatggaaaccgatcatgaaagtcggttcaaagggacaaggccaggtcaagtatctggaaggagaaagccaattcacctatacgaaaggcttccggcccggcagcaccgtacagctgaccatctacaaaaatctgaacggcaatacccgcgccacatactggggcacaaataatgacggatacaccggccgcattatctcagaactcgcccaaaccaatgtaggctctgtctcaaaatggaaagcgctcgccaccgtcgcggtcacatcagaggatcagcgcccttacatcaaatcaaacttctcaacagcctttacgaacatcacgatcgacaataaagcagtcacacctgtgattgatacacaggattttgccaaattgacagtgtcaggcagcagcgtcagcatgtctgtcatcaaataaagaattttgaacgcacgatttctgtcatcgtgcgtttcgttatgtcaatactgccgccgggtgaaaaattggaaacgaggcggattttcatgtacactttatgtaaaccacaaaaatgattgacgttcagtcattattcatacaggagcgaaatttatgaacagagaaaaaaggcttgaattaaagaaagtcaaaccgaaacatttgcagcaatttaatcagctgctccgatatgttttccaagtcacgaacagtaatctgcatgaagtgggatggaaggaacccgaaatcgcctccgcaaaactccccgttttggaacaagcgcatgtattgggctggtttgacaaagacaaactcgtttcacaggcggccgtttatccatttcaagtccggatttttaataaaacgttcgaaatgggcggtgtgacgggggtcggaacatatcccgagtacgccaatatgggattaatggcgaaactgttatacaaagcattagttgacatgcgtgagcgcggtcagtccgtatcctatttgttcccctactccatcccttactacagaagaaaaggctgggaaattatcagcgataaaatgacgtttgaggtgaaagactttcagctcccgaaaatgagcaccgtttccggtgaagtggaacgcgtcgagccggaacatgaggtcattaaagaagtatacagccgattcgcgcataaaagccatgcggccatgatcagaaatgaactggcatgggatgaatattggcgctgggatttagaagagcttacggctgccgtgtattatgaccaatccagacaggcgaacggttatgttctttactggattgcagatgaagtttttcatattaaagaaatggtatatgtaaatgaagaagcgcgaagaggcctgtggaactttatttcggctcatttctccatggtgacaaaagtcgtcggcgacaattattctaatgaaccgatcgcctttctgttagaagatgctgaaattgaggaaacgatttctccttactttatggcccggattgtcgatattgagcaatttatcaatcagtatccctttaaaccgcaaaaagagaagcggacatggtcttttacactggaagatccgctgcttgaatggaatcagggcgtctttacagcggagatttcgcctgaaggaaaagccgttttaagcccgggcggcgatgctgatgcggcgaaactggatattcagacgatgacggcattattatttgcataccggaaaccagaataccttcaccgcacgggccggctcgaatgcagcccggacacattggaattcattgaggatttgctggaaacgcaaaccccttatttctcggattacttttaataaaaaaacagccctcctcagggttgtttttttaacattcctttcattatttccgccaaaatgctgagcagtccgccttatcctgaatattaaattgaatcatgcgttcaagcagctcataatgcaccggttcagtccattgaattctgaataagcgggaagtagcgctgtagccggcgcgggcaatgtcgccggcaaaatgcgtaatacccgcttcttcgggggaaacacttacatgatgcttcgctgccgcaaagccgataacaaaggtgccgtgatcggtaaacatcggcgtgttccacttgatctgcgcttctaagttcggaaattggtcagccgtccacgacaggatttcctccattcgcagacgatgatcaggactgtcgatacttgataaatagtctttgaaaacgtccatgtcttcctccatcaacatcacgtccgctagcgccaaaaacccggattttcagctttttccttgatgttaaattcgatgatcttcttaagcagatcatagtgcaccggatcagtccatcgaattcggaacaggcgcgaagaagcgctgtacccggcttgagcgatgtcatcggcaaaatgctccatcgtctctttttcaggtaaaatgctcaaatgattttttgccgcggcaaacataatgatataggtgccgtgatcggtaaatgtcggtttgttccacttgatctgcgcttctaagttcggaaattggccagccgtccacgacaaaatttcctctgctttgagacggtgatccgggttatcgattcctgatacatattttgcaaacacatccatgcccatctctcctaaaatgaaatatcattactctttacatcatcatagccaacagacggacacgatacaactctggccgggcatgtaaatcgaaaaaagccctccccaaaaggagagggcccgtcccttcacatcacagctttctctaatatctctcccccagctcccgcaaaataaagtcgtagatcattcttgtccgctcttctttcggatacagcatgaattcctgccgcttcgggatatgactgcccatcctgtcctgaaaagtggttctgagataggcggttctgtaaacctgattttcaaaagaatgataggatacttccagttccatcgttttgccgtttgagaacgtgacagctgtgtcatcaaatgccgtcggttgaaaatctttaacgtgcacatgagatatccagccgcattgaggccttgcagaagaaagtgtagggaataaaaagatgtgatttgaagggtccaccataatcggcggcttgtgagaaattttaatcgcttcatatgttcccgcttttctcccggcatagctggagccaaagtagcggcagcttctgtcgatgatgtgaatcggcttcatgctgacatacagaatgcagtctttttcaatgaccttcgaccccattttaccgtctatttcctcaggcaaaacagcgatggttgaacgatttacttcgtagctttctaagggtgcgtgtgttttctggcacataatgtgcagcctccaatccttttcttgaaaatttatactaataatctatcatctgtcattggaaaacgacaggttttttttgaatatagctaaaaatcaccttttaaagatgtaatttagtcttaaattactatttaaatattgtttttctttttcgtttcacctcatttatacgatgatcattttcgttttttcgtcaatttgcaggatatgtcgatatatttccaagtattagttgtctaaagattataaaaattaattgatttttccggtcgttatccatatactataaaaaaggcattggggggattctttatgaaagagaaaaagtcgtacactgagctcatgaagtcccgcaacacgcaaaaagcaaacgaattcgatgtgacaatggccgatatttacattcaaatggtgcttgatgaatccttgtataaacgccggctcgccatgctgaccatgcagattaataaggcgcttgatgataaaaataaagaagcgttcctcacgctttcaaaagaatatgccgcactcaaacagagtgaataagccaatccatatggattggcttttttagattatccgtttacgatggttccgccgttcacatgaatcgtctggcccgtgacatatgaggaatcatcgcttgctaagtacaaatagcttggcgccacttcaacaggctcgccggggcgctgcatcggcacgtctgagccgaagacttccacttccttcgccgagaagctcgccgggatcagcggcgtccagatcggccccggcgccactgcgtttaccctgatgccctgagtgacaagagattgggaaagagatcttgtaaacgtgacgatcgccccttttgtcgctgaatagtcaatcaatgttttgtggcctttataggcggtaatagaggccgtattaatgattgaacttccttttttcaggtgagggagcgcggctttcgttaagtaaaacattgaaaaaatattcgtctgaaacgttctgatgagctggtggctcgtgattttctcaatccccggctgcacgtgctgctcacctgcgttgttgaccaggatgtcaatggaaggaaaggcttggcccgcctggcggatgacatcgttgcaaaaggcttcgtcgccgacatcccctgcgatcagcagacacttcgccccctctttttctacatattgcttcgtctcttcggcatcctgatgctcgtcaaagtaaacgatgaccacattagcgccttccttcgcgaataaaacggatacggcgcggccgatcccgctgtctccgcccgtgatgatcgccgttttcccttcaagttttttcgccgctttcggtttgtcaaaaacggggcgcgggtccattacatattcaaagcccggctgccggttttgatgctgcggcggcaaggttttcttcttctgattagccattttgatcactcctttacattaattactatattatgagtaatttgagcatcttatacgaatttcatgtatgaacagagtcttattggaaaaattaagaatatacaacagaggaggtaaatctgaattgactactttttcaaacgacgaaccggcttcctattggaaagcaacagctgacattccttcctttcccgccctcactgaagatacggaatgcgatattgcgattatcggcggaggaattacgggtctgacaacggcatacgaactgacgaaaagaggtttccgtgtcgctgtcattgaagcagaccggattttaaatgggacgaccgcgggaacgaccgcaaaaatcaccgcccagcatgatttcatctatgccgatcttattcagcagatcggcctgaccagcgcaaggctgtatttcgaagcccatctccgcgccatggaagacatgaagcagatcatcagagacctttcgattgactgcagactgattgaacaagacgcatatctttacacgaatacagaatcaggcgtcaaaaaaatgcgcagtgagcaggaagcttataccaagctcggtattgaacacgagcttgtgaaagaacttcccgtccccgttgattgcaggctcggtctcgccatgaagaatcaggcgcaattccatccgcttttatatggtgcggcgctcgtcaaagagatcgttaaaaacggggcgcggatttttgaacagacggctgcgatcgacataaaaaaagaaccgcagccggaagtggtcacgaaaaacagacacggcatcaagtgcagctatattgtctgctcttcccactttcctttttatgacggaggcgggctttacgccgccagaatgtatgccagcagatcctacgtactcgcggtaaaaccgaaacaagcgtatccggacgggatgtatctcagcatagacaagccgtccagatcactgcgatacaccgatttgaacggtgaaaaactggttcttgtcggcggcgaaagccacaaaacaggccagggaaaagaaatgtccgagcattacgaagcgctgaaacaatttgcggaagacacaatcggggttgaaagcatcccatatcattggtctgcacaagaccttgtcaccattgacaaaattccgttcatcggtcccatctcaggagatgaagaacatattttggcggcgaccggttttaaaaaatggggcatgacaagctcagcgctcgccgcgaagcttttggctgatcatattcaaaacaaaaagaacccgttttccggcctgtttattccgtcacgcttccacgcagatccgggactgaaaaaactgatttcctataatgccgacgtggccaaacaccttatctcgggcaaacttgagaggccggacgcttcacctgagactcttcggcccggggagggaaaaatcgtaacggtaaacggcaaacgggccggcgcctataaagatgaaaaaggctgtctgcatcttgtcgatacgacatgcacccatttgggctgtgaagtcgaatggaatgacggcgaacggacgtgggactgtccttgtcacgggtcccggttcacacctgacggcggggttgccgaaggtcccgccatcaagccgctgaaacgtctcacccaagattgactaaaccattctgtacgaatggttttatttttttgcattaaaatatttttatcagattccttcattcaagttccttccataccgataaaaagaaaaagagaatatctgggggaacttatattgttatttaaaaaagaccgcaaaaaagaaacagcttatttttcggaagccgatggaaaaaaacgcatcgcgctttcaaatcaatatgcagatgtccaaaaacagctgaaaatggtcaggcttggaaacgaagaacttcatgtgcttgaagagctgcagccgttaattaaagaacatatctcaacaatcgtcgattccttttaccgaaacctggatcacgaaaaatcattaatgacgatcattaacgaccacagcacggtcgagcgcctgaaaaaaacattacggcgtcatatccatgagatgtttgccggcacgattgatgatgaattcattgaaaaaagacagcgcatcgcttccatccatttgcggatcggccttgaaccgaaatggtatatgggagcgtttcaggatctgcttctgtcgatgatgaacatatatgaagcaaccattccggatttgcatgagcttttaaaagcgatcaaagcgacgacgaaaatattgaatcttgaacagcagctcgtccttgaagcattccagagcgaatataactgccagcgtgacgaacaagaggaaaagaaagcccgtcttcatcaaaaaatccaggaaacatccggatcactcgctgatttgttttcagaaacgagcagagccgtgcaggagctggtcgataaatccgagggcatttccgaggcgtcaaaagccggcaccgtcacttccgtacatgtcgaagaaaaatcaatcggcgggaaaaaagagcttgaaagccagcagcagcagatgaataaaatcgacgccagccttctgcagattgaagaagaaatggacaagctgaatgacatcgcccagcagatcgaaaaaatcttcggcatcgtgacggggatcgccgagcaaacgaatctcctgtcactcaacgcttcaatagaatccgcgagagccggggagcacggcaaagggttcgccgttgtcgcgacggaggtaagaaagctttcagaggatacgaaaaaaaccgtttccaccgtatcagagcttgtgaacaatactaatacacaaatcaacatcgtgtccaaacatattaaagatgtaaacggacttgtaagtgaaacgaaagaaaaaatggcgcagatcaaccgtctgtttgatgacatcgtccaaagcatgaaaacgagcaaagaccagacaggcaaaatcgacgttgatttgcaggcctttctcggcggccttcaagaagtcagccgcgccgtttcccacgttgcatcatccgttgattcacttgttatccttacagaagaataaagacaaaccgatcggcctttttcataaagggccggtctttttaatgttaacttaaaatataatagagttgacatatataaagactcgctttattgtataaacatattttgataagctggaggaatacataatgaaattgacagaaatgatgcatattgccgtgtttaccgccattatgggacttttggggctgctcccgccgcttttcttatcctttacgccggttccgattacgctccagacgatcggagtgctcttatcgggaagcatcctaaaaccgaaagcggcgtttttaagccaattgctttttttgctgattgtggcatgcggagcgcctctcctttcaggcggcagaggcgggttcggggtttttttcgggccgagcgccggatatctcatcgcatatccgctggcggcattactgctgagcctcagcatccaaggccttcgctcagctgctgtcccccatttgtttatcagacagttcttgttcggcgtgctgtttttgtatgtcatcggcattcccgttcaggcttttatgatgcacattgatatcttaactgccgtaaagctcagcctcatctatgtgcccggagatctgcttaaagcggccgcagcctcattcgcagccgtaagaatcagaaaaactcttcaagcaagccggcttttgccgacgaaaggaagctgattttagtcatcatgattacatcatcatattcagatacagccggacaagcgccggaacagatcgcaattcagacagaaacagaacagatcacctatcaaacttggaacaggctggttaaccaaaccgcaaactggcttggcagccttttaggtaagccgaaaaacattgcaatattactgccgaacggcatcccttttttacaacttttcgcaggggcggcgcatgccggctgcacggcggttccgttagatccccgctcggcagcggcggaactcgcggaccagctgaacatcagcaaaaccggcctcgtcatctgtgaccgccggctgagcggcagactggacggcgtcaaaacgcctgtcatcctgtgggatgaatgcaggcctttgatcgaggcggaaaaaacggaaggcgctttgatcaaaaacgccggcctgcccttttataccggattcacctcgggatcgaccggtaagccgaaagccttcacccgctctcaccgttcgtggctggagagcttttcttgtacgaaacgtgaattcggcatttcccctgatgacaaagtgctggtaccgggcacgcttcgctcgtcacactttttatacggcgccgtcagcactttgtttatcggcggaaccgtcatccttcaaagaaaattcaacccggccggaatgaaagaccggctcagacaagctgacgttctatataccgttccgacaatgacggacgccctgctctcactagagtcgtttccggatacaccgctcaaggtgatttcttccggtgcagactggcccgcttcgtctaaacaagcgctgtcagagcgctatccccatttgcggttgtacgatttttacggaacgtctgagctgagtttcgtggcgttcttatcgcctgaagacagcgcccgaaagcctgacgcggcgggccgcccgtttgaaaaagttacaatcgaaatccgccggcccggcggagaacgctgcatgccgggcgaaacggggaagatttttgtgaacagcccgatgaaattttccggatacatcaacggcgcaaaacctgatgattccggctggatgacggttgatgacatgggatatattgatcgtgaaggctatctttatatcgaaggacgtgaaaacgggatgatcgtatcaggcggcctgaatgtattcccggaagagatagaacgtgtgctcaaccgctgtccgggcgtcagaaaagcggccgtcatcggcattcctgatgattattggggcagcatcgccgttgcggtgatcgacggagatgcaaatgtaaaggaactgaagaaacagtgccgcgagcagctggcggcatataaaatcccgaagaaatggctgttttcagaaataccggaaacagccggcggaaagatcgcccgtgccgccgtacaaaagcaggcaaaggacatgatggaatggaagctgtaattacggatgcgaaacggacaattttcgcccgggaaaacggcctgttaaaagactgtctcccagaagatttggcagctccgctgatccgccatttgagccggaacatgcccgaagacattgatgaagtcctgatcggaaacgcgacgggccgcggcgggaatctcgcccggctgtcagccttggccgccggacttcctttgagcgtgtccggtacgaccatcgacaggcagtgcggctccggactggacgccgtgagggtcgcgtgccactttgttaaagccggtgcggggagcacatacatcgcgggaggagcggagagcagcagccgttcccctttctcatcccgggcgcgcttttctcctgaacacatcggcgatcctgatatgggcatagcagcagagtatacggcacaggcttacggcgtaacgagaaagatgcaggacgaatatgcccttctcagctatgaacggagcgtcaaagcgcacgaagacggcttgtaccgcccggaaattcttccctgtcacggattcgccgctgacgaaaacatgctgaaaaagcggaacatggagcctctcatctcccgtgccaaacccgtctttcagtccggaggctctgtcaccgccgccaacagctgcggaatttctgacggggcggcggcagtttgtgtgatggaagaacaaaaagcgcggtctctcggtttaaagccgggattgcgttttatcggaagcgcggtaagcggcgtccatccgcattatccgtcagcagctccggtgtatgccgtcaaaaaacttttgaaggaacgggacctgtcaccggatgatattgatatatacgaaatcaacgaggcgtttgccgtcaaaatatgcgttttttcacagcagcttctagtgccgtattctaaaataaatgtccggggcggcgctctggccgtcgggcatccgtacggggcttccggggcggcgcttgtcacccggcttttttatgaagcaaaaagacgcccggatgcccgctacgcagcagcagcgatcggcagcggaggcggagtcggactggcgcttctctttgaagtgttaacgtaacggcagtataatagatgatatcgataaaaaatgatcggagtggagactttatgactgccgtttgtttagtaagacatggagagactgattggaatgcccaaaagaagcttcaaggcaaatcggatattccgttaaatgcgacgggagagcgtcaggcgaaagaaacaggagagtacttaaaggggtccgaatgggatgtcatcgtctcaagcccgatgaaacgggccagaaaaacagctgacattattaacggatttttgaatcttcccattgtcgtcatggaagatttcagagaacggagctacggtgatgcggaaggaatgtctttaccggaacggtcgaagcgctacccggataaaaactacccgaacatggagacagcagaagagctgacagacagaatgcttgccggtttagtgaaagttcaggagcggtttcctgagcaaaaagttctgatcgtcgctcacggcgcagccattcatgccctcttgtccgccatttctgacggtgataccggcatccaaaacgcaaagcttgtcaatgcgtgcctaagcaatatcgaacgaattgaaaataagtggcgcgtcaaagattacaatgtaagcagccacctatcagaatcataacaaaaaggcccgaattcagttttgggcctttttggcgagcatttttttctgaagatcatgtaatatggcgtccgccccgtcaatgctccggcgctccgtccataccgccctgtccgcgcggtaaacgtgtccgttttttacggctgtcagctgtttccagaggtgatttttttcgagttctttctcaccgtccaacagcacgatgtaatcaggatcgatatgcaaaagctgcccgggcgccatcttgatagagtctgatttcccgccggaatccgtctggaccgcataggtaaaccctgcgagcgtcaaaagccgggacgtaaaaaactgatcatcctttacggaaatgctgtcatttgcagcgtcaattaataaaatcgtgccgccttctgcatccagctttcttttgatgtcattcagcttttcttcctgagccgacaattgtttctctatgatgccatctttaccgaccgccttttcaatagtaagggcagcgtcaaccgcatcctgataatccgcagcttcattttttaaagcgattgtcggagcgatctttgtcagttttcggtatatccccctgtgaaggcttgagtctgcaatgatgagatcgggctttaacgaagtgatctttttcaaatcagggtgtgacggtggtccgacagacggactgccgtcttttcgctctgtccggttatccgccgcggccgccggctttatgccgagatcatggagggtatcaataaagccttcattcaatacggcgatgcgatgcgggtgcgcagccacatgcgccgtccccagatcgtgcctgacggcggtttcatgttcctgttctgagcatgccgttatgaagagaacggataagatcatcagcatactgaaaatttgtttcatctgttccccctctttcgttttcccgcaattatatcattgacaatataagtatcaatgatattcattatcattatttttataaaatggtttcacagcttttctccgtcaagaaagccgaagactgattcatgccggccgctttatttcattccgctttcgtttccatcagacttctgcattcaacaaaaggtgacatttatcctgtttttgccgcagcttccaaaaatggaatcaaaccgttcgacccagcaaacaagagagcgattgcggctgtgtacaaatactcatgtccttccatcggttttttccattaaaatttaaatatttcgggttcctattaaacgaaagagagatgatatacctaaatagaaataaaacaaattgaaaaaaattgggtctactaaaatattattccatgctatacaattaatccacagaataatctgtctattggttgttctgcaaatgaaaaaaaggagaggataaagagtgagaggcaaaaaggtatggatcagtttgctgtttgctttagcgttaatctttacgatggcgttcggcagcacgtctcctgcccaggcggcagggaaatcaaacggggaaaagaaatacattgtcggatttaaacagacaatgagcacgatgagcgccgctaagaaaaaagatgtcatttctgaaaaaggcgggaaagtgcaaaagcaattcaaatatgtagacgcagcttcagctacattaaatgaaaaagctgtaaaagagctgaaaaaagaccctagcgtcgcttacgttgaagaagatcacgttgcaaaagcgtacgcgcagtccgtgccttacggcgtatcacaaattaaagcccctgctctgcactctcaaggcttcactggatcaaatgtgaaagtagcggttatcgacagcggtatcgattcttctcatcctgatttaaaagtagcaggcggagccagcatggttccttctgaaacaaatcctttccaagactacaactctcacggaactcacgttgccggtacagttgcggctcttaataactcagtcggtgtattaggcgttgcgccaagcgcatctctttacgctgtaaaagttctcggcgctgacggttccggccagtacagctggatcattaacggaattgagtgggcgatcgcaaacaatatggacgttattaacatgagcctcggcggaccttctggttctgcagcgttaaaagcggcagttgacaaagccgttgcttccggcgtcgtagtcgtagcggcagccggtaacgaaggcacttccggcggctcaagcacagtgggctaccctggtaaatacccttctgtcattgcggtaggcgctgttaacagcagcaaccaaagagcatctttctcaagcgtaggttctgagcttgatgtcatggcaccaggcgtctctatccaaagcacgcttcctggaaacaaatacggcgcgtacaatggtacgtcaatggcatctccgcacgttgccggagcggctgctttgattctttctaagcacccgaactggacaaacactcaagtccgcagcagtttagaaaacaccactacaaaacttggtgatgctttctactacggaaaagggctgatcaacgtacaggcggcagctcagtaaaacataaaaaaccggcgtcggccatggccccgccggtttttttattatttttcttcctccgcatgttcaatccgctccatgatcgacgggtggctccctctgaaaattttgacgagaaacggcgggttgacccggctcagtcccgtatcggccaagtcctgaaacgtctcaatcgccgcttcccggtttccggtcagctcaatgccgtagcggtcggcggcgttttcctgataccgggagacggcattcgtaatcggatcagaagcaaaactgagaacggatatgagcagcaataacagcgggagggccgccagatcttcaggcccctttatatgaagcattcggccgaagaatttggacagccgcttataaagcttgtcaatgatatagaacccggctaatgacagcaggagatacccggccagtccgatgtacacgtgcttcatcacatagtgccccatctcatgccccataatgaacaaaatttcccgatccttcagtttgttaagcgtcgtatcccacaaaacgattcgcttattcgaaccgattcccgtcacatacgcattcagcgcattcgttttctccgacatatttacttcataaacatggctggccggaatgtcggctttgtcggcaagcgacaagattttgctttccagctccttgtctttcagcggatagaaatcattgtataaaggatcaatcacgaccggctgcaggaaaaacaaaaacagggtaaacggcacagtaagacaccaagcgtaaaaccaccatttttttgtatgctttgtgatcagccagtaaaacacaagcacacacacggcaaacagcggaaaactgatccagaaatcaatgacatggtctcttatccagcttgctgttgtctgcgtcgaaatatgatacgcaagcgaaacccgatatccaatccattcaagcggaagcgaagccgccgtaacgatgagtgaaatcacaaatacgaagcttacgatttgcagcacccgaaagcgcaccgcggcttccagccaatgctttatttttttggcaagccccgtaatgagcagcagaaaaaataaaaaccaatctaacggcgctccgatgaaaaataaaaaatcctttacatttgaaaagttttcagcggctgccaggcggcccgggtccataaacgaggacggatcggctttcgttccctttacggcctccgggacggcggagtcgcctgtcataaagaaataccaatagaaaaaaaggccgtacagcacataggcaagtcccgctgccgctatccatttgcgcatggaagtctccctccttagcctgatgacttactcctattgtaagcataaatgcaaataaatagaaccaagcctccgaaacggatgttaatcttttcacaacagaaaagaatggaacaacaggaagcgggaaagactaaaagacggagtgatgaatatgaaaaaaataatcgcgtttattgtagtaatcgcccttttggttattgctttcttctatgtatacagccggaccggcgatgtgtttccatcaagcaacgcagatctgattattctgtctgagcacggaaaaaaagaaatcaaaattaaagacaggcagaatgtaaaagatatgctcgatatcttgaaccaaggaaaacaagtcaaactgaccaaaagcgtgtctcccgattacgacggaacggtcaaataccatgaagaccgttttgattcattcagcatgtggctcgaaggcggcaattatatgatgtacaagtataaaaacacgtattacaaactgacccggcatgatacgaagcttgtgcaaagcatcattaaggaagaatcgcagagctgaccggatcagcatgtaaaagcgaagcccccggcttcgcttttcgtctgtcatttcggaagcatgtcccggaccgcccgcctcagcagcttcccggtcgcgttcttcggaatctcatcaagaaaaaccacttccgccggccgtttatattttgccaaatgtgtttcacagtaatcaaaaaccgcctgctctgtcagctcaccgtcccccggcactatataagcatgcaccgcttcccccgttttggcgtcaggaacgccgatgaccacggcttctttaatgccctcatggctgtagagcacttcttctacttcgcgcggatagacgttgtatccgccgacgagaatcatatctttttttctgtcgacgatataaaaataaccgtcttcatcgcgcttcgccaaatcacccgtgtacagccagccgtctttcagcgcgtgctccgtctcctcgggcatcttgtaatagcctttcatcacattcggccctttcacgatcaattctcccacttgatggtcgggcaattcgcgtccgagcgtatcgacgactttattttcgacatgtaaaatattcgtcccgattgagccgggctttctcccccggtcaaacggattaaaacaagtaaccggagacgcttcagaaagtccgtacccctccagaatggtgacgtcaaaggtttgttcaaatgtctgcaacagagcgaccggcatggaggccccgcctgaaatgcacagtctgacggacgcaaaatcctccgccttgccgtgctcgtattgatacagatagttatacatcgtcggaacgccggcaaaaatggttgcctgacggcttttaatcagtttaaacacagaagccgggctgaattgcggctcgattaagacacacgctccgctcatcagaggcgcattcatacagacggttaaacaaaaaacgtgaaacatcggcaatgccgccacaattttgtctttctcattcattcctaagtatccggcgacatcatttgcattggagaaaagattctgatgggtgagcatggcgcctttcggttttccggtcgtccctgaggtgtataaaatgacggcagtatcatctttggacaatgtcggataagttctgctgcgctccgccgggcgaagcatttttgtaaacgttgtcatttttaagcgcaattgagggtcttctgtcgatggagcgttctctgctgtctggctgataatgatatgctccagcagcggcagcgagccgtgcaggctttcaaatacgggaattaaaaggtcgatgccggcgatcgctttgacatcgccgtttttcagcatgtatgcgatttctgaaggtgtatatgccggattaacaggtatgacgacaattcccgcttttaacgcgccgaaaaacgcaataacaaaatcaggcgtatttccgagcagcagcgcgagatgatccccttttttcagtcccctgtcctccaagccgtttgcaaatgctttgattttacctgccagctcctcatacgtcatgtactgatcttgaaacagacaagctggtttttccggtttctgcgatgccgtttcttccaatttggaaaccagattcattttcccacccctttaaaaattgtaatgaatgaatagtcattcatttatccggaataaacgttcacttttattatagaaaaatatagaaaaacactcaagggcaaaaagccccgagtgccgtaaaaccggaaactataattgtttcagcgcttcactgaccggcgtgccgcccgccgtcagatcgaatgctttttcatacgtattcggttcatcaagggatgcgataacggtcttggcgacatcgtctcttgaaatggaacctctttccaaatcggccgcggctttgatttttcccgtgctgggatcatttaataacccgcccggccggataatcgtatacgtcagaccgctcgcttcaagaattttatccgcataatgctttgcggcgtaatacggcttcagcgcttcattccaattgccgcggttatgagcctgaagggcgcttaccataatgaaccgcttgatgcctgctatctttgccgcttctatcgctttcgcggctccgtcaagatcaatcaaaagcgtcttatcgtatccggtgcttcctcctgatccggcggtaaacacaatcgcgtcacagccttcagcggctttcgcgatgtcttccgggcttccttccaaatctgcaagaacggcttctgttcccgcggcttgaagcgcttctttctgctcttgtttccggaccatcgcccgcagcgtatgcgtgccgtctttttgaaacagcccggtcagccgctgtccgatctgtccgtttgctccgatgagaaatactttcatcatgatccctccccattcattatggttctatcatttcacaaaaacgggcgctgattcaaatcatgcgttcggcaaatgttctaataaatcagctcgaggaaatcttccagctctattttgccgaaatactgtttcagatcgattccggccagcgcctccttgatagcggttcggtcatactgttttccggtcagcgcctgttcgacttcactcacatctttcgcaccgaagaaatcaccgaaaattttgcagtcctgaatgattccttttttcacttcaagacgcagatcaatcgatccgaccggataacgtttcgaatgctgaagattaaatgcgggcgaccttccgaaattccagtcccagttttgatagcgctcttcggaaatcttccggatcgctttccagtcttcatcggtcagtttatattccggcacttcggaaagatcatttgtattaaaaatatggtgaagcaggtgctttttgaattcatccgccgtcattttgtcatcaagaaactcgctgatgttggcgacacggcttctgatcgacttaatgccttttgattcgattttgtcttttttcactttcaaggctgacacaacatgatcaatggcggaatccagcattaatgttccgtggctgaaaatacgccctttcgtcgaaaattgagcgttgccggaaatttttctgccgtccgcgacgatgtcatttcggccgcttaattcagcttccacaccgagctggcgcagcgcctgaataacgggttcggtgaattttttaaaattgtgaaagctgtcgccgtcatccttagtgataaaactgaaattcagattcccgaggtcatggtaaaccgcgccgcctcctgacagcctgcggacgacgatgattccgttatcttctacgtatttcgtattgatttcttctattgtgttttggttcttcccaatgataatcgacggctgattgacataaaacagcaggtatgtctgttcagggtcgagatgcttcacgcaatattcctcaatcgcgaggttgatcctcgggtcggttatgttttggttgtcgataaataacatggtgctcctcctttatttctcccacttcaatccggaagcggcgattgtcacttcgcccccgaactcggattccgcttcttctttcagcttccggtgctcgccgaaatgaggcagatgcgtgagaatcagctcccccgctccggcctccttcgcgatccgtccggcttccaaactgttcatatggccggctgacgtgccgtcctggtctgcgtaaaaattgcactcgcagatcagcagatcggcattttccgcaaacgggataaacgcgtcctggtagcttgaatcagccgtatacacaacagaagctgaaccgtcagtaatccgcatcgcataacaagtgaccggatgcaccgttttcagaaaggtaatggtgaacggacctagagaaagcgggcggtccggctgataggccactccttttgtatgcgttttatatgtaaggcgctcaaactgttctatatcagcatcatgcccgtaaatcggcagtgcatgcgtcccttttccgagaaaggagccgacctgtttggcaaattgaagcggcccgatatcagcgatatgatcatggtgataatgggacaaaatgacggcatcaagctcttctgccggaacataggcaaacagctttgataatacggcgcttccgcaatcgacgagcagagaatagccgccggactgaaacagatagcctgaagttgcttcgtttgcggccggaaacccgccgcagcacccaataactgtaactttcatatgatcctccaatgtttatgataaaaagatcctttcctccaatatacctatttttcgtacaaattgcatgttttaaacattgtgccaaaacagccgttgattttcttaaactgttataatacaatgtagagacaaaacaatgaaagagggatgggtatgttggaaaagatgtcggattttttcagaaatttacccggtaagaaatgcgaagaatgcggaaatgagattgttgagcagtatgagtgtcacattaatctgtgcaatgactgcttgaaaattaaggatatgtgacaatagggcgccgcacaattctaagttgtgcggcgcccgttttttcggccgtcatcatactttctgaatagggcgttattcaccattattagcaattatctgtacgttttaaaagattcagtatattcaatctatatttttctatagacggattgttttcttttctattataatttgttctaatagctatctttttagatacttattgcacttttttcttcgggaggtaatctatgaaaaaattacgctttggactagcgacgcaaattttcgtcggactcatactaggggttgtagtcggtgtcatctggtacggcaatcccgccattccaacatatttacagcctatcggcgatttgtttttacgcttaatcaaaatgatagtgattccaattgtcgtctccagcttaatcatcggcgttgccggcgcgggaagcggaaaacaagtcggaaaattaggcttcagaacgattttgtattttgagatcattaccacttttgccattattctcgggctggctttggcgaatctgtttcagccgggagcaggcgttaatatacatgaagctcaaaagacagatatcagtcaatatgttgaaacagaaaaagaacaaagcggtaaatccgttgcggacacattcctgcatatcgtaccgacaaacttcttccaatcattagccgaaggagatctgcttgccatcatctgctttacggtgctgtttgcactcggcatctcggcaatcggtgaaaaaggaaagcccgtattggccttctttgaaggtgtttctcatgcgatgttccatgttgtgaacctcgtcatgaaagttgcgccgtttggtgtttttgcgttgatcggtgttaccgtttccaaatttgggctcagttccctgctttcactcggtaaactggtcggtttagtatatgtagctttggctttctttctcattgttgtattcggaatcgtcggaaagcttgccggtttaaacattttcaaattcctcgcctatatgaaggatgaaattttattggcgttcagtacgtcaagctccgaaaccgtactcccccgcatcatggagaagatggagaaaatcggctgtccgaaaggtattgtttcctttgttgtgccgatcggatatacctttaacttagacggatctgtgctgtaccaatcaatcgccgctttattcctcgctcaggtataccacattgacttgaccatttggcagcagattacccttgtgcttgtcttgatggtcacttccaaaggaatggctgccgtgcccgggacttctttcgtcgtcctgcttgcgacactaggcacaatcggcgttcctgcagaaggccttgcattcatcgccggtgttgaccggattatggacatggcccgtacggtcgtcaatctgaccggaaacgcgctggcatccgttgtgatgtcaaaatgggaaggccagtatgatcccgttaaaggcgcgaaggtcatgagcctcgccaaaacagaacaaaacacaaccatctcaggttaaaatgaaaaccctgcacggaatgatttccgcgcagggttttttatgccatcggcgataaaacgtaccggtgcaaaagcttcgccgtattaagaagcgataattcatgcgtgcgttcaaaagcgtgtgaagcgtcaattcccgggccgatcagcccatggacgatgtcatggcccgaacggatggctgctgaggcatcagaaccgtaatacggataaatatcaagctgataatcaatgccatagcgctccgcaagcccggccagatgttttctgagctgataatggtacgggccgctcgcatccttcacgcaaatggagacggtatattcatccgtagactggccgtcgccgatcgcccccatatcaacagccaagtattcgacggtctcaggaggaatgttggaattgcctccgtagccgatttcttcattattagaaatcagaaaatgcgtcgtatacggaagttcgattttctcttccgtgatgcggcggattaaattcaagagcagagccacgctcgctttgtcatcaagatgccgggacttaataaagccgctcggcgtaatctgcacgcgcgggtcaaatgagatgaaatcgccgaccctgatgccgagatcggacgtctcttccttcgtccggacaggctcatcaaggcggacttccatattctcctgattccgctctgccttgccggcgtccttgtagacgtgcactgaagtctgatgcattaagatggtgcctgtataggttttgccggaagaagtttggatctcgcaatattccccttcaatcgagtgatatcggaagccgccgatcaagtcaatcttcagccggccgtccgcctttatctcctttaccatcgcgccgagcgtatcgacatgcgccgtcagcaatctgtgtttcttgtcatcacggccgggaattgtgacaaaaagaccgcctttgcggtttctgtaagaggagacgccccattcttttaaaagactttctgtataggcgataacctcgtatgtattgcccgtcggactcggaatcgacaccaattctttaatcagttccatcgtatgtttcatatttgccacaggtcattcctcctatcaattttattcttcttaaaatatactcttttgatccataacccgtccaatcttttccttctcttttttcatagaatgaagggagcatgagcataggagggaaatgtatgatcagccgtaaaccgcacaagcggaaaaggtttcataatgattggtttgaggattggtttgaggatgattggtctggtgcagccttctggggctgtaaaaaagaaaaagatcactgtaaaaagaaaaaagaagacccttgtaaaaagaagaaagataaaaagaagaaagataaaaagaagcatcatcattcatgccgccgctgctgccgtcattggtaatcgttcacacaagcccgttttacaaatagatatctcatgctccccaaacagcggatgctgcttgggtttttttattaaaattagtaccaagtaataatatcaggtgttataatctgatataaaggagtgatttttcatgtcaaaatctaaaattacagcaatcggtacatatgctccggcacgccgattaacaaacgcggatttggagcgcatcgtcgatacatctgatgaatggatcgtccagcgcaccggtatgaaggaaagacgcattgccggcgaacatgaattcacatcggatttgtgtgtggaagcggtgaaaaaccttgcagaacgatacagcggaactcttgatgatgtcgatatgatccttgtcgccacaacgacggcggactatgcgtttccaagcaccgcggcacgcgtgcaggcttacttcggctggccgcacacgggggcgcttgatattaacgccacatgcgccggactcacttacggccttcagctcgcagacgcattaattaccgccggttcccatcaaaaagtgattgtcattgccggtgaaacattatcaaaggtaacggattatactgaccggacgacctgcgttcttttcggagacgctgcaggcgccctattggtggaacgcgatgaatcagcgccgggctttttggcagccgtgcaaggaacagcgggaggaagcgcggacgtgctgtatcgcacgggactgagcacagaattaaacggcgagccgcttaaaggcggaggaaacatggtgcaaaacgggcgcgaagtatataaatgggcggccagaaccgtgcctgaggaatgcaatgcccttttagaaaaagccggcttttcaaaagacgatctggattggttcgttcctcacagcgccaacatgcggatgatcgaatccatctgcgaaaaactgcccttcccgcttgaacggacgttgacaagcgttgaatattacggcaacacttcatcggtttctattattctcgcattggatgaagctgtgaaagcaaaaaaactgtcggaaggccagacgctggtattattcgggttcggcggaggattgacgtataccggactgttggtgagatggggattttaaaagtacgacgatcgaaatctaaaaaaaagaggccctgagcatctgctcagagcctctttttcttatgctgttatttcttcttccgttttgtgttcttttttgctttgcaccgtaaaatacacgatggtcagcgcgatcatgacaacggcgatgcccaacagaatggatgcctgctgccacatgtagccgtagtcgccatttgaaatgacggcacggaacccgttgatgctgtaagtcatcggcagtgccccgtgaatcacttgatagaatcccggcaggagttcaagcgggaaggttcctccgcttgccccgagctggagcaccagaatgatgacagcgataaagcgtcccggattccccatcgttgtcgccaataattgaatcatggacaggaacgcgatgctggtaatcatcgtaaagagatagaatctccacgtgctttccacatcaagcccgattccttttaacagaaccgtggcgacaataacggattgaatcagtccgacaagcagaataacactaaatttgctgaggaaccattcaaaaccgtttctcggacgccctgaagcttcactcagagggaatacgaccgtcagcatcaatccgccgacatacaagcccatagagagaatataaggcgtcagtccggtaccgtagttaggcacggaatgaatcgcgttatcgtccgtttttaccggatcggcaaacatgctgtacgttttgtcatctgtcttaatgtccccggtttgatcagccgcatctttcagctggctggacaattgtccggtgccgtctaaaagcttgcttaaaccggtgccgagagacgcttgaccctgctcaattttggacgagccgtcatggattttgttttgcgcgtccagcagtttcgttaagccgcctgacacttggccgctccctgacactaacgcttctgatcctgatttgagctgtccgaacttgctgttgtattcgccgatgccggccgtcagtttgttttggctttcaaaaacagtctgcgctccgctgtataatttatcagttcccgctgtcagctggttaatcgcgtcttgtaccgccgctgcgccgttatacagtttcgatgtggactgaggcagtgctttcagctgatcagccttcgcttttacatctttgagcgcgctttttatgactgacatatccggaagctgaatatctccgccggacggaagctggctgacgatattgtctaaatccggaaggtcagccttcggaagcttctcattcagaagctgaacaagtttcgctttttgctcatccgttaagaaatcactgtccttaatcacctttttgaccgcgtcatcccgggcatccaggctgtttttcagatcagaaagcttcttcttaaactgctgcaggtccttttcagtctgttcgagctgcccaaccgcgttttcaatgtctgacaggttgactgaattgatcgcatcttcaaatgccgccgctttttgcgacacttcctgcgccttgctgtttaacgcgcttaatccattcgttaaatccggaagcttttgctggagctgcttttgtgcgtcaaggcttgttttcagcccgctggccacttggcctcctcctgaagcaatctgtcctgatttatcttgaatttcggcgcttgcgctctgaagttttgcgatagagctgtcaagcgtttgaattccgcttgtcactttcgccgcgccgtctgcaagctgctgtgttttatcgccgatggtggcggtgctttcagtaagcttcgctaaattttccttcagcttggcgctgccgtctttcgcgtttttcgtgccgtcgtctattttcttggctccgctgctggctttgccgagccctttggcaatatctttaaagttatcaaaaatgacttttgcgtattgctctgtcacttctttcgacacggaggctttcagtttgtcgatcgccttttccccgattgtcgcgccgacatagtttgatccggcattcgtatgatatttcagatccaacttcttcggatttttatccattaccgtgctggcgtttttagaaaaatcttcaggaatctcgaccaataaataatatttagcatttaataagtcctttaacgattgatcaagatcgcttgaaaaatgccaatcaaaattatcatttttctttaactctttcacaaggtcgtcaccgatctgaagatgtttcccttcgtagtccgcccctttatcctggttgacaacgacaaccggcagctgatccaccgtgccgtacgggtcccagtacgccttcaaaaacactccgctgtagatcagcggaacgaataatatggcaatgatggggattaacagtttcttgttcgttacaatgtctttccactggctttttattgtattcaaccctgttgcctccttccgcaaactgactcatttgacaaaacggtcacggcacctaaaaagtgaaggatcatctattatttagataatccttgaccaacatacatttccagcaattcagcgatcgtctctttttcaagaggcggatggtttttttcccagtcaaatatcagtgcgatgtagagcttgagcatcacaaaagcggtcagttccggatcacacggtttaatgcttccgttttcaatggctgtttctatcttttctttaatgtatgacagaatggcccgctccattttcacaatgacatcctgaacggctattgtaccaatctcggtgttctcctgaaaaattttaatagtcagctggtgtgtttttctgaattccaaaatcgcgacaagcgcccggtggacattttcgtgaaatgaaagctccggtttcatcgcttcgtctgcgtgttccttcatttctcttaaaatagtggtgaaaatatcatcaaacagttcttctttgtttttgaaaaacgtgtagatggttcccttccccacatttgcaagctttgccaccagatccattgtcgttgctttgtagccgaattgtgtaaaagacttcgttgccgcttccagaatgagctttttccgatcgacggacatgtttcccacctcgttaaattgaccgtttgaacgttttagtcattttgtacataagataacttatcacagtcacaaagaagattcaaatgttttctctttttattggtgttccctttacagaacgggaacatgcaaaaaaacctccgttttacgataacggaggctggtacgtttcaaataaataagccagtgaatcgtatacggcggcttttccctggtcgatacagtcggggatgcccaccccttcgaaagacgcgcccgtcgcgtatacgcccggataggaagctttcagcgcatctctgaactctttgatgcgctccttatggccgacatggtattgcggcatgctttcgttccagcgggtcacacaggtcatttccggttcgccatttattttcattacttttttcaaatcttccattacgattttaatgatctcgttatctgaaagatctacgatggattcatctccggcctttccgacgtacgccctgagaagcgttttgccctccggcgccgcgtgcggccattttttattcgtccatgtgcaggccgtgatggagaagtcgctgtttcttgagataacgaatcccgtaccttcatgctccatcttgacggctccctcaggaaaacctaaggcgacgttggcaacggacgtagaatgcatgtctttaagacatgaaaccgccggcagatcagaaagcattttcgccgcggctttatgcggggctgttactatgcatccttccgcatagagcactttgccgttatcaagcgtcacggaatatcctttctcctcgcggccgatatgggtgactttcgttcctttcatcacctttgtcagcgtaagctgcttttccagctcctccaccaacgtttgaagccctgtcgtcagcgttaaaaactggccctgctttttggccgtcagctgctgtcccgaaggctgcggacgtgattttttcataccgagaatcaggcttctgtgcttctgctcagtctgatagaattgcggaaacgtggacatgaggctcagcttatcaatatctccggcataaatccctgataatagcggttctattaaattctcaacgacttcgtcaccgacgcgtctgcggaaaaattcacccagagactgatcttccttcggtttgctcgcaggcaggacaaagtcaagcgccgcccgcgcctttccgggaacagaaaataaaccggtggagatgaacggagcgattttggtcggaatgcccatcaccgcgcccttcggcatcggatggagcgtctcgttgacgagcacgtaagactggccggtcgcattgttgacgagcagatgctcaagccccaaatctttgacgagctgcggcgcgctttttttcctttccaaaaaagaatccggcccccgctcaatgatgtagccgtctttatgcgccgtctgaattttgccgcccgctctcgggcccgcttcaatcagagtgacctcaagcggcagctgtttttctttgatttctttttccatgtagaaggcggcggctaatcccgttatgccgccgccgatgatgaccagatgttttttatcgccactcatttttatcgccttctttaccgtttaattctacttgtccagctctttcagcacgaccgctgcaagcgcgtcgataaattcaggctgtgcgttcggcatagccggacgatagtagcttgcgccgacttcttcggtcacagctttgcattcataatcattatcgtaaagcacctctaaatgatcggcaacgaagcctgcgggcacgtatacaaatgctttataaggatgcttttggtacagatcgcgcgtgagatcctgcacatccggcccgagccacggatcaggggtattcccttcgctttgccagccgactgcgtaatcggtaattccggcgccttcggcaatcagttttgcggattcctccagctggtcaggatacggatcgccgtattcttttattttttcaggaaggctgtgcgctgagacgatcagcatcgcgtcatcccgttcttctttcggcattgattcatacgttttcttcacctggctgacccaataatcaacgaatttcggttcatcataccagctttcaacagacttgatggtcaagccgccgagcttctccgcttcttctttcgcgcgtttgttgtatgactggacgctgaatgttgaaaaatgaggggcgagcacaaggctgacagcttctgtaatgccgtctttatgcatgtccgccaccgcgtcttcaataaacggttcaatatgttttaatccgatgtacactttgaatgttacgtcatcctggatttcatttaaacgctgtgcgagcttctccgcctgctcctgcgtaatttttgcaagcggcgaaatgcctccgatcgcttcatatctgtcttttaaatcttgaagcatatgaggctccggctttcttccgcgtctgatatgcgtataataacgttctatgtcctcttctttgtaaggcgttccgtaagccatgacaagaagtcccattttctttttgctgctcattttgttaaacacctcttttgatggtctgtccaccttgattttgacaggaaaatcttcttataaccaacgatctgctcaggaagatcgttccgtttttttggccgcggagtattcatgtacaaacgccgtcagctttttcagcgttgccggattgacatcagggaatacaccgtgccctaaattgaaaataaacccgtccgttttcatgccttgatcaagtatcgctttcgcttttttctcgatgacttcccaaggcgcaagaagaagcgacggatcaagattgccctgaaccgtttttgtaatgccttgttttctggcgtcatctatgccgagtctccaatcaagaccgacgacatcaagaggaaggtcatgccaatccccggccagatggcttgcgcctacgccgaacatgatcagcggaacttgttctgctgaaagctcccggaatattctgtccatcaccggttttataaactgccggtaatcttcgcggttcagcgcgccgacccatgaatcaaaaatctgaatggcttttgcgccggcgttaatctgcgctttcgcataaacgataatcatgtccgcgagcttgtccatcagcatttgccacgcttgcggcatactgtgcataaacgcttttgttttgttgtaatttttagaaggcccgccttcaatcatataactggccagcgtaaaaggcgctcccgaaaaaccgatgagcggaacattcagctgttcgtttacgagtaatcggatcgtttccagcacgtaaggaacatcctgttcgggattcagttcgccgagcttttcaatatccgcagcagagcgcaccggctgatcgatcaccgggccgattccgttttttatttcaacatccactccgatataaggaagcggcgtcataatgtctttatataaaatggcagcgtccactccgtactgctcgaccggaagcctcgtcacatacgcgcacagctcgggctgatgcgtaatttcgactaagccgtacttttccttcagcttgcggtattccggctgagacctccccgcctgtctcatgtaccagacagggacgtgatttgttttttctccccgtgccgcttttaaaaacgtatcattaaacgcttctcgtttactcatctgaatttccacctttcctcctgcaaccatacgttcgtgttcttcgcccattacactataccttgttttttcaaaagcgtatagaattgaggcttaatgttcaaaaaatcgccgaattcatgattaagaagaaaaaagcttcggctgaacgtattccgttccctctccttcttgatccgtctgtgaattatatggaacgactttgtatgaagcccctgaaaacagattggcgtacggtatgtcaaagctgccttttcctttcaccgaatccagaagtttgtcttttccgtctttcttctcatatattcggtaaacaacccgatcatccttttgaatatcccattttaattgaaccgtaatcagtcccatcgccttaaatgtataacgggccgacagggactttaccgcctccagctcaatcgggctgcccagttccttcacattttcaggctttttgaatgtccggccgttttcccccgcttttgtgacgatatctttaaagagtctgaccgggtattggcttccgcctttcaggtaatgggttttatccgttttgtcatagcccatccagacggctcccgtcagtccgggagtgtatcccgcaaaccaggcgtcctttgtcgcgccggggacgccgggaaatgtggtcgtgccggttttccccgccaggtcaccttgatagctgccttgtgaagcggttccttctttcacgacctgctgaagcattctcgtcatattccatgccgtctgtccgctgaagacgcgcgttttgccgtttttaggcccggataacgtttctccgtcttcgtccgtgatgttctctataaaaaatggcttcgtatacattccgtttgccgcaaaggtatgataagctccggcaagctgaagcggggtgacgccttctgacagaccgccaagcgcaatcgcgagtccgttgtcagaaatgttcatgccgtttttctcaagatacgattttcccgtatctacgccgatctgcttcaatgtccagacagcgggcgcatttatgctgtaagtgatcgcatcctgcatcgtcacttcccccttgtactgtccgtcataatttttcggttcatacccgtcgtaggacgtcagtttgtcttggagaagcgaatacggtttgaacttgtcttcctgcatggcgggcccgtatacggcaatcggcttaaacgttgagcccggctgccgcttcgccgtaaccctgttgtatccttttgtcacgtagtcgcgtccgccgaccgccgcgcgcacgcctccggttttattatcaataaagacggcgcttccctctgccgcctgatccgtccccggaaaatagccgctttccttcatgagggtgtatgccgttttctgcagcttggaatcaagtgacgtccggatcgtatagccgccttgaagcagctgttcacccgacatcgaataacgggattccgcctccttgatgacaagatcgatataactgtcaaaccaaggcgtttctgatgttttcttgacattaagccccaatgtccggccctgggctctgacggcttccttggcgctgatatagccttggtcgttcatcattgcaagaatcgtatcgcggcgttctttatttttatccggatgctgaatcggcgaataaagagatggcgccttcggaatcgctgccagaacggctccttctgcaacggttaaatcttttacttctttattaaagtagtagtgggacgcggcttgaatgccgtaaacgccatggccgaaataaagctggttcaggtacatttcaagcagcttgtccttgctgtaatcacgctcaagattgatggcgataatgacttccttcgtcttgcgcaaaaatgttttatcatgagtcagaaaaatgtttttcgccagctgctgggtgatcgtgctgccgccctccaccttgccgcctgctaaaacatcccggaacaccgcccggccgacagacttcacatcaatgccgtgatgttcgtaaaaccgtttatcttcaacggcgataaaggcatctctcacatcttccggaacctgctgaatggataccggctcgcgattttccgtatagaggctcgcgatttcatcaccgttttgatcgacgatttttgaagatgcgtgcagtattaatttcttttcatcgatgacataatggccgagaaatataatgataatgtatccgattaacgcgagaaaagcggttgccgccgcaattacagccggaataaagaatctttttttctttttcagcataagtcacctcgcctttcttaacttgtagtatgggaaatattgtttcgaattatgtcagaatgagtcgccaatagaaacttataccactcttttgatatactagcaagcaggaggtggctgatatgaaggtttatattacatacgggacagccgattttttaaagacgattgcaaagaaacacccgagtgagaatatggtgctgatgcaaggggaggataatgcggttttaattcatgaaacaaatggagaaaccgtttttcaggcgccccattcctatgaaagcatcgacagcgtcggggaaatcaaaaatccgggctacgccgtcctcaacaacatcgccgttacccaggaaggccgtccgctgtttgaaaaccggtttaaaaaccgcgccggcaaagtggaaaatgaacccggttttgaagccatccgcgtattaagaccgctcgaaggcgatacgtatgtcattttgaccctgtgggaagaggaaaaagcctttcaggattggcagcagtcaaactcttatcaggaagctcataaaaaacgcggaacatctgccggcatcgacacaacgtctattttctcccgcccgtcttatgtaaccgcttattacgcaatagactgaaaaccgccggagattctccggcttttttgatgtcccgattttacgcatccttctttgcaccttccgcccgcctatgaataatctgtagcaatcctatttataaacggagtggttcaattggggatcggcgtctactcggtacatctgctttatgttgcttttatcgcggccattatcgtttttatgctcctcaggaaagatacaacctttatttcactcgccggcatttttgtgattgcgctatggacgacgcattcattctccgcttcggtcagcagcctgtttcacagcttcacgtatgccgccggagaattgctgccgacgatttttatcatttgttttatcgtggcgatgagcggcctcttgaccgaaaccggtattaatgaagcgatgatttctccgtttgcaaaggtgatgaaagggccggctgtcgcgtattgggttatcggctgtctgatgtttgccatctctctttttttctggccgtcaccaggggtggcgctgatcggcgctgtgctgcttcccgcagcgatccgggcgggcctttctccgatcgccgcggcaatggcgatgaacctgttcggccacggattcgctttatcgggggattacgtcattcaggcggccccgaaattaacggccgatgccgcgggcattcccgtgagcgatgtcatgcaggcaagtattccgctcgttttgatcatggggttaacgacgacaatcaccgctttcttcctcatcatgcgggatcgaaaaaaaacgaaggcccccctctccttggacagctccggttctttggacacaagtatgtatctgccgaaaaaactcagggtggtcctggcggttttcattccgcttgtttttctcgccgatattatctgtatgatcgtataccgcctgcaaggaaacgatgcgacggcactcgtcggaggaaccgcgatcggcattctcctgatcattcatttcattgtatataaagagcggcatttagaaaagatcaccgagtattttatcggcggttttcaattcggctttaaagtattcggccccgtcattccgatcgcggccttcttttatctcggtgacgcggggtttaaaagtattttgaacaccccgctgccgaaaggatctgcggggatcgtcaatgacctcggattggccctgtcccattcttttccgatgtccggagaattcgccggcatcgccctggccgcagtcggtgcgattaccgggctcgacgggtcagggttttccggtatatctcttgcaggctcgatggcaaagctgttttccgccgcgcttcatacggacccggccgttttaacagcgctgggccagatttcagcgatctgggtcgggggcggaacattggtcccttgggcactgatccccgctgcggctatttgtaaagttgacccgtttgagcttgccaggaaaaactttatcccggttgcggccgggctagtcgtcacaacgatcgccgccatcatcattctcccgtagcaaaaggattgaaatcttctgacattttctatacaatcatgggaaaagcagacgagggggcatcgcttttgacgttaacgacacttcaaaaaagcttaaacgctcagcttgacgggctgtatgaggaaatggttgaaatcaggcgtcaccttcacatgaatcccgagccatcctttaaggagaaaaaaacaccggcgttcatcgcctcattttatgaaaagctcggcgttcccatccggacgaatgtcgggggcaacggtgtcacagcctatattgaagggagtgaaccgggaccggtcgtggcactcagagctgattttgacgctttgccgatacaggatgaaaaagatgtgccctatgcttcacaaattcccggcgtcatgcacgcctgcgggcatgacggccatacggcggctctgctcgcggtcggaaaagtgctgtactgcaaccgggaaaaactgaaagggtcatttgtgatgatccaccagcacgccgaggaattatctcccggcggagcaaaagcaatgattgaggatgggtgcctcgagcatgtcgatgccattttcggcactcacctttgggcgactgaacccgccgggacggtcttatgccgcccgggcgcagtaatggccgccgctgacggctttacgattaaagtcatcggtaaaggcggccacggcgcgattcctcacgatacgaaggacgccgttttaatcggctcacaaatcgtcacggctcttcagcatatcgtcagccggcgggtaaatccggtgcagccggccgtcatctcagccggctcgttcaccgctgaaaatccgtttaatgcgattgccgatcaggcagtcatatcaggcaccgtccgctcgtttgacgaaagtgtgcgcagcctgctcgaagcagaaatagaagccgtcgtaaaaggaatctgttccatgcactccgcttcctatgaatatcgtttcaagcgcggttatcccgccgtcgtcaatcatcccgaggaagcggcgcacgcggcggccgccgcagcggaaacagacggcgttacgaaagtcattgaaggagagccgcagatggccggagaggatttttcctattatctgcagcatacaaaaggcgcatttttctttacgggcgccgctttagaaaacgcggaaaccatttatcctcatcatcatccgaaatttgattttaatgaaaaagcgatgctgacggccgccaaagtgcttatcggcgccgcggtgagctacccccgatagggcataaaaaacagccggtacattacgtaccggctgctgtgattcttaaatgaaaaacgtgccttgccgtctcaccgagctgtgacagcagtttataattggccgctccgcccacggcggctccgacgaccggcaaaagctgaaacaatttcaccacgtccagataatcgcggtattcctgctgaaaaactctccaatcgacatcatgctttttcgaatcccactgttcaatcattgagtatatgcgtttccgctgttcaccgcttgagaaagccagctgaaaaataaacagcaaaaacaatcgttcatccctgtctttcacatcatagccgtaaatagaggcaagatcgaacagacatttcattttaatggataacagcaaaggaaaatcagccatccctaaaaaaattccgccggcccccgtaccgataccttcggctgccgcgaccttttggtacgatgcgatggtttgtctggcgagggcatctttttcagcaagcgtcataccgtttgtatcccgcttgcctttcaccagatttgaacccgccattgttgcttcggtcatttttttaatgctttctgtgatgacggcatgaattttatcaggaatccgctcatttattttcgcctgcattcctttagaaaaacgttcaagcatagaatctttgcgtaaaaaacgcgctttccattgcagtgcttcctgtatcagctgctgatcgtcggtcatctgtgtctccttctttcattgaggtttcaaaaacccgattgattacagcttgccgtactttttcaatcttccgcccatatacgaaggcatgatcacaaaaatcagaacggctgaagcaacagccgcatacagcgccccgctgactcccgcggcataggctgacgctgcacagaacagcagcgcctgcacggttaatgccgatttcatcagcgaaaagaaactttgcagcttcgctttctgattgaccgggtaaagctcctgcagagaaagatgatgaaaatgcccgaacagcgggagaagctgtattcccgtaataaagacggtaaatacggttaaagccgccgttatccacggattggcggaaacgagcataataatcaggataaaaataatcgtgagcctgacctgaatgccaagataatcatttgaacgcagaaaggcccgcgcatacatataggagaacgttttccgctgttcgaacggaatcattctgagcaaaaagtcgagatacgcccggcgttttgcctgttttttcaggtgaggcacatcggtaaacagattggcgattctgtaaaaccgctgcttccttcttaattcatattcaatatgagcttcccattttaatgatttatgttttgcggccgatgtgaaatacacataaaggccggccatcacaatgtagacggcggcagcgtacacataaaacgactgtaagacgaagtataaaagcagcatattgcagataaagcgtatgaccgcatccatcattttcatgcttctgtcattcataaacgtcatccgccactccatggcctgattccacgcttttaccgccagcatctgaataaatacggcggcatacgacgcaagcgacgcccccggacttacagcgaaaaacaggggcatgcatacaagcgacagagcaataagcggaaacagctgtgacagatagctgtacttaaatgaatgcttaaagtatgtccccattttcggttcaagcggcagcagaaacacgaggtccgcttcctttaacagcgtccggacgtatgaaccggtcagcacaaatgaaaagagcaccgccatcacccaaaatgacggaaaatgaacgggaatgtctttgacccacttgctgtaccagcttgccgcgccggcaataaaaaagatcagcacaatgacgagatgatcattgagcatatatttcatatacattctggtttcctttatatgctcttcaagccgggactgccaaatcgtagacatattattcatggccggcgtcttccttcgtcagttcgatatacaagtcatcaagagctgcgtctttcatgccgaactgctctctcagttcttccagtgtgccgcttgcccgcacttcgccgttatgtaaaataatgaaagcgtcacagtagcgctctgccgtagccaggatatgcgttgacatcagcacgcttgatccggcttttttcgcggcgtccatccgctccagcaatgcattgatcgcaagcggatcaaggccgagaaacggctcgtcaatgatataaagcgaaggctccgcgagaaacgcgcacatgatcatgactttctgcttcatccctttagaaaagtgagcgggaaaccatttcagccttttttccattctgaattctttcagaagcggaggaagccttttttcaagcgtttctttggaaaggccgtacgccatggccgtcagctccagatgctctttgagcgtcagttcttcatacagcaccggcgtttcggggatgtacgtaaattgcgagcggtagctttccttatcctccgaaaacgtcttgccgttcagctcgatcgagcctttatgcgggtccattaatccgataatatgccggatcgtcgtgcttttgcccgcgccgtttaatccgatgagtccgacaatctggttcggctcaagggtgaatgaaacattttttaagaccgggtttctcgtataaccgccggttaagtcttttaccgatagcagagacataatttctccccttctgattcgtttttcttcatagtaccaaaaataaagtctgatttgaaacgattccctttttttctcacgtgaaaagtgtgcatagttatcgttttggcggacatcataatgtatgtagaaggaaacagctttaatcaactgaaaatgaggtgtttataaaagacgtcttagaacagttggatgaaaatcaacatgtcctgtgcttacaatttcttcacacactgctttgatgatgttcttcattcatgatgaaataatcaaatgaggtgtttgtcccaggaatgattaagcagacccataagtcttcattttaaaaacaaatgaggtgcttacaaaaggcatattcaattttctgtgataaagctcgaccttctgcatcagggtgaacgcgcagccgttcatcctgttttttgttttggccgtttttgtggtacgatgagaatatacatatatttcttttcagggaggaaacccatctatgcacaaagcggacgattgtattttctgcaaaatcattgccggtgacattccgtcttcaaaagtatacgaaaatgaacacgtcgtggcgtttcttgatatcagccaggtcacaaaaggccatacgctcgtgatcccgaaaacacatatcgaaaacgtgtacgagtttacgcctgagctttctaaagaatattttgaagcggtgccgaaaatcgcacgcgccatccgcgatgaattcgagccgatcgggctgaatattctcaataacaacggtgaaaaagcgggccaatcggtgttccattttcacatgcatatcattccgcgttacggaaaaggcgacggtttcggggctgtctggaagacccacgccgaagactatacgcctgacgatcttcaggagatcgcttcaaccgtcagaaaacggcttgcctcatcttaaagatgaggtttttttgcgtccggaaacacaaaaaacataaattatatttttttatatcaaaaaaatcaaaaaattgtgataggataattgtattatttcttacactaaagcggaaaacagggagagatcgtaaacatggaacgtacaacgaatttcaatgcaggacccgcagcccttccactggatgtgctgcaaaaagcacaaaaagaatttgtcaacttcaaggataccggcatgtccgtcatggagctgtcccaccggagcacggaatatgatgcggtgcaccaaaaagcaaaaagccttctgaaagaactgatggatattcccgacaattatgatattttatttcttcaaggcggcgcaagccttcaattctccatgctgccgatgaactttttaacgccggaaaaaacggcgcacttcatcgtaacgggcgcatggtctgaaaaagcactcgccgaggcgaaactgttcggaaacacatccgtcacggcaacaagcgcagattcaaaccacaaccacataccggaagcggacctctcaggaatcaaagacggcgcctacctgcatattacgtcaaacaacacgattttcggaacgcagtggaaagagttcccgaattcaccgatcccgctcgtagccgacatgtcaagcgacatcctgagcagaaaaattgatgtcaaaacgtttgatgtcatctatggcggagcccagaaaaacctcgggccgtccggcgtcacggtcgtcatcatgaaaaaatcatggcttgaaaacgaaaacgccaacgtccctaaaatgttgaaatactccactcacacaaaagccgattcactgtataatacgccgcctacatttgcgatttatatgctgagcctcgtccttgaatggctggctgaaaacggcggtgtcgaagcggctgaacggcgcaatcaggaaaaggccgatgtcctgtacggcacaatcgacgcaagcggcgggttttacgcggggcatgccgcaaaagacagccgttctcacatgaacgtcacgttcaccctccgcgacagcagtctcacgaaaaaattcgttgaagaagcgaaagcggctaaaatgaccggactcggaggccaccgctcagtcggaggctgcagggcgtctatctacaacgccgtcagcctggctgattgtgaaaaactggctcagtttatgagaaagttccagcaggaaaacgaataaatttcttctaacataacggttcctttgatatactgtttgcatatcaatttttccggccatcgcaataaatgacgagcatattattggatggcgaaaaagcttagcagaggagagcttagtatgaaaacaaaagaattagtcactatggccctgtttgcggcaatcggagcggtgcttcattccattatgccgccggtattattcggaatgaaacccgatatgatgcttgtgatgatgtttatgggtattctgttattcccccgtgtgcagaacgtgctgatgattgggattgtaacgggaatcatttccgcactcacgacatcttttccgggcggacagcttccgaatatcattgaaaaaccggtaacggcgtttctgtttctctcgctggcgcttttggtgaaaaagagcgtgaaaacagcggccgccgccgtcattacgatagccggcaccttcatctccggtttgctctttttggcgctggcccttctgattgtcggcctgccgggcggattcaccgcattggtgctcgcggtcgtccttccggcggctgcgctgaatacgatcgccattatcattatgcatccgattgtgcagacgatcttaaaacggtccaatatgattgaaacggtgaaataaccgcataccgaaacctcttccggccggaagaggttttttaatgtgtttcagcatgttttatacgagaagttttgtgaaaaagataaggaacaatgcgagggcggttcctgctgagcagacaatggccttttggcggacgacccgcttcggcggataagaagcggcctggccgagcagtttcaggtaataaacggcgcccgccgcaaagacaagagccatacaagataaaacaatcataaagacagacaaccttctccctccttttcccttaaaaaatatgctaaaataaagcaagctatgtatagaagtttattcttctgaacaaaaatgataaaagttatgagaaaaaaaacggggtgatttcaaatggctgacggacgttcccttttaacaggccttttcgtaggcggattgatcggaggcgcagcggtgttactctcggctccttcatccggaaaagagctgcggggcaaaatcaaagcgaattgcaattcaattgaggacacaatcaaacggttaaaaaaagacggaatggcgcttaaggaccagcttgtccaaacggcgaaagaaagcgcagaagtcattaaagacgtaggcggagagcttcagaccagcattaaaaggtggcaggaggaaatcaaaccgcaccagcaggatctccagaaggaaatcgctgatattgaagagaaaatcagacagctggagaaaaccttacaaaactaatatcctatacaaccaaaaaaagtgcggacatattgcgttccgcacttttttttgcggtttaaagcctttcccagcaacggatgaagaatttattataaaattcttaaattttcatctttattaatctttattttattggcataatagaggaaaagaaaatgtgaagcaggtgatctgtattgaatcgtgttgaaccgccttacgatctaaaagaagctttaatctatacccaaaaaatggcgcagctgtccaaagcgctgtggaaatctatcgagaaagactggcagaattggctgaagccgtacgaccttaatattaatgagcatcatatattatggattgcctatcagcttaaaggagcttctatttcagaaatcgccaaattcggcgttatgcacgtatcaactgcatttaacttttcaaaaaagcttgaagaacggggatatctgaaattttccaagcggctgaatgataaacggaacacgtacattcagttaacagaagaaggggaaaatgtattcgaaagcctgcttgaggagtttgatccgtcgagaaacgctgtgtttaaaggctcacagccgatctaccacttattcgggaagtttcctgaggttgaagaattaacctgtgtcatccgccacatttacggcgaagattttatggagatattcgagaaatcattgacaaacataaacaatgattttgatagtgaagacggaaggctgaagaaaaaaacggacgaatcggctgtccatgaaacggctgaagagctggaaccgatcaacagttaatcaaagtgcttcataatctcaataaattcttccatcagcgctgtataaagcccctgctcatacagagcaaaaatcgtttcatgaacatctaatttttcgttcagctgtcccgcaaaaagcgcaaggagcttgtcaaacgtcacaaagccttgcgctttttgcgactccagctcgtcctccaattcgcggcagatccgcccgacctcttctccttcttcttcggtcagccctttttcaatcatcatcgcataaaaagggtacttatccatatccaccgttttcaccagcaattgtatgtaatattctaaacgcccgatacgctgatccattgaatccatccgtttcacttctttctatctttaatcttattttagctgataatgaatggagaagaaaggttaaaccgtacatttccatgtttcaccgagctcttctgttcttctctttccaggtttatttttttctttaaaaaaggattgattttttctcctgaagagagtaaattattttgagattgtattccatctttgtacggaaggatgactctgatgaattgctggaaaaccattaatctgatcaaagattatggtgcggttcgtttattattgactgctgtaggttttatgatcctgttttttatatgcaacttcttggcattcgggctgctgcgtccgaatatcagtttaagtgacgggcacgtgtttgctttttgtgttctgctcgttgttactttatttgtacataaagtcatacatgtcctgccgatgatctgtaaaaaaagaaaaaaggaaatgaaaatgtacttcttgcggatgccgacatggaaaggcataccgaaaacgacgatgctgatttcaacgatcagcccgtttttattcattacgccgttattgttttatgccggactggcatttccgagacacgctcattacttttatatgatttcgagcatccatgcggggtattgcctgcctgatcttctgtttgccctgcatctggtcaaagcgcccaaatcatgtctgattgaccaggaatccgacggttttgatattttagtaaaaaaagtgccggagtcttgatgtcccgctgatttttcaggttacattctatcttttttaataaatatttggtaatgtaatatgggagcagttcagagagagggggaatctcccatcattttattctattttatcgtggctgccctgtttattctttatttcataaacaggctcacaaatacattatgccttgtcagagagattcctgaagaccggcaggataaggtattccgttttattaatgtatctattttaattttactgatctcttcattcgtcgagatctcctttactgtgtaaacaggcaaaaaaatatggctgacggaggtctgacccccgacagccatatttttttcttaataaagccaagaagcgccgatgatgatcaataagatgaacagaacaaccaataatgcaaaaccgcctgcaaatacttcacccatctccaaaagcacctcctacaaaacgttttatttttccaattacatcatatgcaatttacttctgaaacgattaggcgcccgggtaagaaaacggaccgcttttagaaaaagcgatccgtttcgcttaacaaatgtaagctgcacctacgatgataagcaatatgaacagtactacgagcagtgcgaaaccgtttgaatatcctccgcccatggttcattacctccttttcatgatcaatatatttgtatgtatcaggaaaaagtttgactagacgaatgccctttatttaaaatctttttacagaaagccacaatatgttatgatacgcatatgcaatttaatttggatgattaggagtgtttaaaggaatgaagaaaatcgcgatagcagctattacggcaacgagcgtcctggctctcagcgcttgcagcagcggcgacaacgacgtgattgccaagacggatgccggaaatgtaacaaaaggcgagctctacacgaacatgaaaaaaaccgcgggcgcaagtgtgctgacacagctcgtacaagaaaaagtattagcaaaaaaatacaaagtaacggataaagaaatcgataccaagctgaaagagtacaaaacgcagctcggcgatcagtacagctcccttaaacagcagtacggcgaagattacctgaaagatcaggtgaagtacgaactgcttgcacaaaaagcggcgaaagacaacatcaaagtgactgactccgatacgaaagaatattacgacggcttaaaaggtaaaatccgcgcgagccacatccttgtcgctgacaaaaagacagctgacgaagtggagaaaaagctgaaaaaaggcgagaagtttgaaacgcttgcgaaagaatattcaactgacagctcaaaagacaacggcggcgaccttggctggttcgataaaaagtcaatggatgaaacattcagcaaagctgcattcggcctgaaagtcggacaagtcagcgatccggtcaaaacaaaattcggttatcatatcatcaaaaagacagaagaacgcggcaaatatgatgacatgaaaaaagaactgaaagaagaagttcttaaacagaaattaaacgacaactcagctgtacaggcggcaattcaaaaagtcatgaaaaaagctgacgtaaaagtggaagacaaagacttaaaagacacgtttaacacttcaacttcttctgaatctaaataaaaaaactgtgcgggctctcggcgagccgcacagtttttttatgcgatggaatgattggagttttcttccgcatccccgttttcacttgcgggcgccgccatacggcgctcgcgttcctgttccatccgttcaatatacacccttccttctttttcaataaacgactggtcaagcttttcctcttctttagctgttgtgaaaagcttataagcgctgaaaataattccgataatgcaaaggtatacccaccaaggaaaaaatagcacgtcggtttcctccctttttcacccagagtctttattctaagctatgcttgataaagacaagttatgagagctgaacgtaaaaaagaccgatcatagagaatcggcctttttatcttattgatggaaagtcggtttgtagaaagaacggttttcaagcgcaaatacacgctctgtgtattcgcccggcttcacccgttccagcgctctgtccatcatgatcatttttgcatccagattatcaatgtagtgcagaatttccgcttctttcaccatcggcggtttcgggcttccccattccgcttttccgtgatggcttaaaatcaaatgcttcagaatcagcacttcttcagcgtcaatttgaagctcttcggctgcttttgaaagctctgtcaccatgatcgaaatgtgcccgagcagattcccttccacggtgtacgttgtggagacggggcctgaaagctcttttactttgccgagatcatgcagaatgactccggcatacagtaaatcccggtcaagagacggatacagatcggcaatcgcttttgccaggttcagcatggacactacatgatacgcgagccctgaaacgaactcatggtggtttttagccgcagccgggtaatccataaactcagccgcatattttttgaccagatgtcttgtgacccgctggatgtttggatttttcatttcaaaaatgtattgagtgacggtttccatcatttcgtttttcggaatcggcgccgtttccagaaaatcatcaatgctgacattttcattctcaccggccggccggatgtttctcagcttaagctggtttcgtccgcgatagtgatggacatctccgatcaccttcacgatcgtctgcgccgcgtacgttacttcatcagtcggcttggcatcccacagcttcgcttcgatatctcccgattggtcctgcagcattaacgtcaggaatggttttccattgcttgcgattcctttagtcgaagatttaatcagaaagtattgatcgacctgctcgccgacctcgtgcagcataataccttttgccattctattaaaagctccctccatatcttacataataccagtatagcacatacctcttttttgaaaataaactcttttatgacaggagccgcatgacttgtccgctgtgaaaagaccggctgacatgctcatggcaggtgaaataaagtatctgccgcccgccttctgaaagctgattcagcacatcaaacagccgctgcagccgctgcctgtcaaaatggacaaaactgtcatcaagtaaaaacggcagtgataccgcagattccctctctgacgcaagggcaaaacgaatcgccgcataaagctgctcgcatgccgcctgtgacagttcgcctgcagaaaacaccgttccgtctttccgcatgaccataatggaatcatcagcctcggaaaaatacaatttgtgatagcgtccgtccgtaagcggcccgtataatgcaccggcggtttctaacagacggggaagcgtcacttttttatgccgctccattttttccctgataatgtgtctgaccgtctgtaatgcggcccactctttagcggtttttttcacgcgctccttctgcatttctgtctgctgttttaaatcggatacaagccccgaggactccaactgctcttgcttcaccgttaataaagcggtttgctcacggagctgggcgcttttttcctcaagcgtttttttctctgtttccttctgaacgactgtatgttcaagttcggacactgtgcggctcatgtacggctccagctgttttccgcctatgccggacaagtgcgttttgatttcgcgcagctgccgctctgtttcccggcggctttcattcagcctggcgagttcacaaaagtgttcgcggttttttgcgcctgccgccatgaaaagctgtttgacctgctgttcgtagtaatgaacttcttcgtttaattcacgcatttgctcttgtgcatgcagcagatccatttcgagcgcctgctttcgttttgcttcctcacgggcccgttccgcctgcgccagcaaaacgtgcagtctttcttttacggacagctcccttccgtctgaaggactcagctttttgacccggtcctcaaatgctctttgcagcttttgcagcctgcccgcttcaatggtcagctcatgcttgttaaggatttcttttttgacatctttcatcacatgatatgcgtcaagaagatgggaaggacttcctgaaaaccccagttccttcataaaaagttccgcctgtttttcagacggcgccatttcggcctcccattcttcatattggcggatgactctttcatatgccgcttctttctgttcaagcacggcttgatccgcaatcagctgctgccggtgccggccgtcacgccaaagctcttcctgcagaagatcagccgcttctttagagatcgccggcttctttttcttgtgtccgggccctcctctttctgacggcagcggtttttgcatgccggacagcatatacagcagcagagcaccggtaaaaagggcggcgggcagccattcctttaacatagcgaaaatcgcaatgaacagaatgcccgcaccgagaaagagctttttttgtttggcgcgctgtttttccagatgctgaacatgtgcctgccattcgtttccttctgtatcagccgtttgcttatatgattgtaaagcggcttctttttctttcttgacagcggggtccaaaatgttttccgccgtcacggcatgttttcgttcggcttcttccagctccagccgcgcttgttcgaaaatcgcatcaagctgtgtctttctttctctagcctgtccggcgctctgcacggcttcctgcagccgccattcatattcataatcggtgttcagtgaaagaatgccgtcttcctcatgtcttccgagctgctgcaatcctgacgaaacgcgggcagatgtctgccggatctgtgattggatggctgcaagctgttcgccgcgcgattcatacatatgctgctcgccggaaagctcctgcagctgccgctctttttgcagcaagtcctcatttggagcgagcagatcagcctgccgcctgagttcagccgcttttgcccgaagcccctcaagacgggccgctttcggatggagatgcgattcgtatttttcaagctgatgcattccgtccttcgggaattgcttcaatgcttccggataagaagaaagttcgctttccaaggctgtttttttgtctgcgagcggctttgcttctatcgccgattttactgttttgatttcttcagttatgtctttcaatcgtgcttcggcatcctgcaaacggccgccggcgctttttttctcttccagaaggctgtgatagcccgcttccgcagcttccgcctgtttcagctgggcgctgagccgctttaatgtatccaactcctgatttaagcgggggttccgcccgttcggcttatacatcctgtcaagttcttttgccagccgcccgtcaagctttgccgccgcttccgacccgaataagctcgaatacaggagaaactcgccgattttgtcccggttaaaagcttgaatctcctgcagtccgaatacatcgaacgaatagatcgcttcgtacagcgcccggtctgtatcggagagaagctgtttgagccattctccgtccttgatttcgcctgaagccgtatacactctgactttttcggcagcgccttttgtccgttcgattttgacagcgccgtgatcgccatgcttcaattccacagtgccgccgtaaaccccgccgtttttcggttcgtatttttttgatttcggaaaaccgaacagcacgcttttgataaaggacatcaatgtcgttttgcccgcttcatttaacccgtagatcacttgcacgggagaatctgacagctgaaaacttcggtcggaaaattttccgtattggtaaatatgcatcgccgttattttcatcgctgaagctccttcatctggcgtcttaaaacggcttgagcctgccgcttaatatccagtatctcttcatctgtaaatgaagccatctgacgccggtatacgggatgacgctcaagggcatcaaatacaccgctcatatccgcgcattgttctatgtcctgaaggagccctttaaaaaacggatcgagcggcacggtttctgtttcatccgtccgatcctcaagcgcaagcggccagacgaaacattcctcttcggcctcttcctcctgtaaagcggaaagaagctcctccgcgatgcctgcgggcgcctccgtccaaaagcggggcgctgcgccgcgaagcaccagcctgacacatgccgggcggcccgccgcgcgcaagccggagaatgtatctgatgcggctttcagaagtgaagtcatatgttcagctccggagatatcaagatcaatttcctcccataacacatcatgcgcttctttgaattcccaagacatctcaccgtttgccgcccggacgagataatatcccttaggtccggtttcttttaaatgccgggcttgaatattcccggggtaaatggcggcgggatgctgggcggacaggacctgccgtttatgaatgtgtccgagcgcccagtaatccatgccgcttttttcaaggtcttctttcgtaaacgggcagtacgggtcatgcccttccgctcctgataacatgccgtggagcatgccgatatgataaggcgcgccggtcattttccggtaacgggccgcctgattgaccgttacgcttctttcctgatagctgcatccgtatatgcttgccgcaagctctccgtttttaaagaaagatttttcctccggtgtatccgaggtgaatgtatgtacattttcaggccattcaatcggcgtccacttaccgcccaaatgatcatggttgccgaatatgacgaacacttggatatccgcttcctgtaatctcgtaaactgttttctcaaaaacagctgggcttttaaacttctgttggcttcgtcaaacagatcccccgaaagcagcacgaaatctgcctgctcccggagtgccccgtccgtcagtcggcggacgctgtgaaatgtgctttctttaatacgcgcatataccggttcaggcagattcgaaatgccgtaaaacgggctgtccagatgcaggtcagcggcatgaataaacgtcagatcagccatctcgccctcccctttctgcaaattgaattacccttattttagcaccgtttttatacgaatgcacgttctgtaaaataaaaaaacagcccggctgttccgggctgtttcacttattttttggagatgcgcagcgcttgtttgatcgctttgaatccgctggcgtttccgtaaatcaaaacgccgcctttgtaaattttcgcgccgaccgctgcaaagatcacgatagtgaccagtgtcagggtgattccggccgcagcctgccaaaacgggatatcgagcatcccgacgcgtaaaaacataatcatcggcgtgaaaaacggaatgtaagatgtaacggtaataaaaccggcgtcaggattgccgatgccgaacatggcgatcataaaacctgccacgactaaaaaaaccatcggctgaatcgtctgctgtacgtcctctatccggctgacaacactgccgagaaacgcggcaagcgtcgcgtaaagaaaatagccgagcaaatagaaaatgacagcatagactatcgtcgagacgggaacatccgtaaaattgagaaatgcactgatcggcgacgacgcatcattttgagggttcagcttcagtgagagataaccagccgcaatcagcaccgcaaactgtgtgatccccacgagcgcgataccgaacagtttggcaaacatctgctgaatcggcggcatgcttgaaattaaaatttccatgacgcgggacgatttttccgtcgccacttccatcgcaatcatgcttgcgtacatgataactgagaagtagatgacaaacagcatgatgtatacaagccccattacctgaccgagctcttcctcggatttcgcccctttttccagcgcgtctttgctgacttccggcggagtgtagaggctgctgactttttctgccgaaatgccgagcttggcggtttcaacagcggtttttgtctgggttaaagcctgcttgagcagtttatacgctgattcatcagaaatggtcagcgccttgtatgctcctgttatcgttcctttttgatcttgtctgatgataaacagtccgtcccattcaccgtctttgacacgctttacggcatctttttcggactccttcgtctccattgcctgcagatcattgtctgtatccgccgctttaagctgttttgcaaacgccgggtacagcccgcccgtttcatcaatcaccgcgatttgctgcttgccgtcatccgattgaaacacggatataatcgattgcaggttggtcaccgctaatactaataaaacggtaatggcggtcgaaataatgaatgactttgtcgcgattttgtttttatatgtatgaaacagcataatccaaaatttattcatatacggcccccaccttttctataaaaatatcatgcagtgacggctcttccaattcgaacttccgtataaaacctttcccttgcagcgcccggaaaatatcctgagaaaccggttcattcgcgacctgcagtctgattccgtcatttgtttccttccatttcacgacgccttcatgcgtttttaaaaagctgaggtcatcatctgaatgaacggtgacattttttttgccgaaagaccgcttaatgtctttcagattgccttgaacgacgggttttcccttctggagaatgcacaaattctcacaaagctcttccacatgctccattcggtggcttgaaaaaacgatggaaacgccgctgtttttcaaagaaatgaccgcttctttcagcagctcgacattcaccggatcaagaccgctgaaaggttcatcgagaatcagcagttcaggcttatgcaggacggccgaaatgaactggattttctgctggtttccttttgacagctcttctactttcttattcttgtaatctgtaatgccgaaccgctcgagccatgtcatgagctctttttccgcctcttttttgctcattccttttaatctcgccagatagacaagctggtcactcaccttcactttcggatacagcccccgctcttccgggagatagccgattttttcactgatggaataattgaccggcttccctttccaggtgatatgcccgtcagtcaggcttaaaagacctaaaatcatccgaaaggtcgtcgtttttcccgcgccgtttgcgccgagcagcccgaacatttccctttcaggtatttgcaggttcaaattgtcaacagcggtaaagctgccgaatgttttcgttacgttttcaattgtaagcacgaatccaactccttccttgacccattatatactaataatgggtaaaaattaatggaggattttaaattctttatcagaatatcattctataaagggggtgacatgatgggacaatatgtattgaccgcattccatgcgtcgggagaaacgctgctgaatgaacggatcgaagcggataatgaggcggaggcgaaggccgccggagaggctttattgaaggaaaaaaagcttgagaacagtactcatcgcttggtaaatgaagccggaaagctgattttattccacagataacagaagctttccggcttctgtatgttaccggttaaattgcggcgtccgtttttctaaaaaggcgcggatgccctctttatgatcatccgtttttctcatattttcctgggcctttcgttcaagagacaaaacgtcttttaaccggctgatatggaggctctgataaatagccttcgtttcaatcatcgctgacagcggcgcatgcagcaatcggtcgatatacggttgggccccctccgcagggccgccgctgaacagcccgtcggcaagcttgagccgcaccgctttttcagccggcaatttttcaccgctccaaatcagttttttcgcttcgatctcaccgacgcgtctcattaataaataatggcctcctccatcgggaaccaatccgatgccgatgaaattcatcgcgaggcgggcgttttcttcggcgagcaccacatcggcgcacagcgcgaaactcagcccgagccccgccgcggctccgtggatggcggctatcacaatttttttcatatcatagagcgtcagcgtaatggattcgatcattttcatgagccgttcatattctcccgaatcatgatccgacgtcatcatctgaatatcaccgcccgcggaaaatccccggccttccccccgcaagaggacgataagcgcttcgctgtcggctgccatcacgcatgcgttttccaattcccggagcatttgttcattcagcgcgttgtaactgtcaggccggttcagcacaatctctgcgatctttcccttttcttcataacgaatatactgcatgtttacaccctccttgtatccgcttacatattttgttcaaatgatatattccttccgccgaagcgaaactcctttatttttcaaggtcaatagataccgaaaaatgcatatcatttgaaactgaacatacatttttatatagtgaaattgatatacaaaacaaaagggggaaaaacgccgataatgaaatatgtgatactcagcttgttactgagcttttttatggtgctgttccccccttcggatgtcgctcttccttcccaattggtgacagaaacagacagccatgtacaaatttcggtttacccgcaggaaacggattcggcaaagacgccggttcacaccaaaaccgctccgcaaggcctgtcaaaaggatacggtgcgttatcccggatgatctccctgttatctgtcaaacctcttgatcaattcattgattccacaatggaaaggacatgcgccattccgatacaataccagtcaaattacctccggcatcagaccatttctcattgccaatctgtatttacggtgtaaaaacagtatattccggagggattttttatgaatattaaagaaaacgatctgcccggcatcgggaaaaaattcgaaatcgaaacgagaaatcatgaaaaaatgacgatcatcattcatgatgacggcaggcgggaaatttacagatttgatgaccgcgaccctgatgagcttctggcaagcatttcacttgatgatgcggaagcaagacagattgccgcgattatcggcggtatggtgtataaaccgcaggcgcttgaatcgattgaaatggcgttcaacgatctgattatcgaatggtttaaagttgaaaaaggggcaaaagcggcagggcggacgctcggcgaactggatgtgcggcagaactatgacgtgacggtcatcgccatcattaagcataaccggaaaaagcttttaaacccgggcgctgattcgctccttgaagcaaacgatacactcgtcctctcaggtgaaagaaagcatctgaaaaagctgatccaagacttcctctccagagacggagtgtgatctgtttatggaccatctcgtatttgaagtcggtacggcgttagttcttgtagccattgcgagtgtcatcgccaataaaattaaattctcgatcatccccttcctgatcattttaggaatgcttgtcgggccgcacgcgccccaagcgggcatcattgacctgacgtttatcgaaagccgggaagtgattgaatttttcggacggatgggcgtcctgttcctcctcttttacctcgggcttgaattctcggtcggaaaattagtcaaatccggacgttcaatcgccgccggcggaacgatttatattctgattaatttcagtttagggctgatctacggctttatcacgggcttttcctttttggaagtgcttgtattggcgggcgtcatcacgatatcatcaagcgccattgtcgcaaaggtgcttgtcgacttaaagcgcacggccaatccggaaacggagctgattctcggcatcattatgtttgaggatatctttctggcggtttacttatccgtcgtttccgggcttgttctgggagacgcgacgtctgtcggaggcgcgctgatgtcaatcgtgatcgctttcggatatatgctgctgtttttcattgccgctcgaaaattgccgcctctgctgaacaagctgcttgatatccgttcaaacgaggtatttgtcatcgtcattttcgccgcgctctttttcattgccggcttttccgaaacgattcatgtcgctgaagcgatcggcgcgctcttgctcggactcgtgttttcggagacggcccattctgacaggattgagcatcttgtcgtgccgttccgtgactttttcggggccatgtttttcttcagcttcggtctgagcattgatccgttttcactcggagatgcggtatggcttgccctcggcgccgttctgctgacgattgccggaaactttatcgccggcatgatcgccgggcgccgggcggggctttctcataaagcatcgtctaatatcgggctgaccattgtgtcacgcggcgaattctccattatcgtcgcaaatctcggcatcgccggcggcctgtccgcttcacttaaacctttcgccgccttatatgttttgatactggccatcttcggccctttgctcacgaaagaatcgaagcggatatatctcctgttgaacagcgtgttcaaatggaagacgcctgaaaagaagccgcagaaatcataaaaaaaagctgacctcttcataaggggtcagtttttttgagcgggaagaaattgctgaaaagccgtttttttattaatggagaaatgctcttttcccagaatggtattgatgattttttggtttctgtaaacagacagcttcaaattcgtagcgcccgttccgtgagcatgatcaagattcgttaatgtgaaaaaatgatgccgcctgtcgtccttaaagacaagacgggaatcggccgtcactttaaagcgtttctcatcctcccattcgatatcgggggcaattgccgtaaaccattccggaatatgaggtttaaagccggtcgccaaaatcactttttctgaatcggccgtaaaggtttcatccatctgccattgatgaaagctcagtacgcagcgcccgttttgcttttcaattttttcaagctccgccatcggctgaatatacacgtcaggcgaacctccgctgatcgatctgtgatacagggcatcgtaaatggcggcaagtgtgtcagaatcaatgccgtggcgcagtccgtccagctcagggagtgtgttcagccgttctttaaaaggcaggcggttaaaatattccacataatcaggtgtaaacatttcctgtccgagcttggcggtttccaattctcggaatccggcggagcgtgtcacccattgcagccggctgcggcggtattgttcatcgtgcaataagtcagaaaagatctccgcggcgctctgtccggagccgaccactgtaattgattcggcgctggcgagctcgtctttccgaaacaaatattccgtgctgaccatcgtgtcctgacgcgcttcgtcagcaatctctgcgggaataagcggttcagcccccgttcccatgacgaaatgcttcgtttgatagacactgatgcttccgtcctcaatgttcttgacgctgacgtcataatgtccgccggcatttttcacgccgattacctctgagccgaaacggcatgatttgatttctgaagccgcccagctcaaatagtcgttaaattcccgtctcggaatatcaaattcattaaacgtataaaaccggtacagccggtcatgttcatggagaaagtttaaaaacgtgtagcggcttttcggatcggcgagcgtgaccaggtccgccagaaacgccacctgtaaatccgtccctttaattaatagaccgggatgccacgcaaattctttctttttatcgaaaaaaagagcgtctgttccgggtatatcctctaacaatgcggcaagccctaaattaaacggcccgattcccgctcctatgacatcatacatattatgcacctcttgcgaataacagtctgatggtcttttcccgtttttacagacggttaaacataaaaaaacggcacgctgattccgtgccgtttttgatattataatgcagatttgacgaacatctcatctaagtatttgattttctcttctgtataatgctcgaatcggtcattatatgatttcgggtctttcggattggcgaagtgcgtgatttttccggtttccggatgaatgaatttgcttgccgcgccgcagccgataccgataatcgtctgcacttcttccataatcataatgttgtagatgctttcctggccagggaaggagtagccgacattttcaaggtttccgagaatgtttttctgccggtacaagtagtacggcgtatagccgtgctcttttgtccagcggacggcgtcatccatcatgcgggacacttcctgtctgtcggcaactttatacttatgcttgtttctcgtcatttctgacgcccgtttaaaagaaagcgtatgaacggtcaaagattcaggcatcagcttttccgtttcctcaagactgtgcctgaactcagccgtcccttctcccggcaggccgatgatcaggtccatgttgatgttgttcatgccgtgtttgcgggaaagatggtatttttcgatggtttcttcaactgtatgatgtctgccgatggccttaagcgtttcgttttcataagattgcgggttgatgctgattctgtcaatcttatacttatttaaaacggccagcttttcctccgtaatcgtgtcgggtcggcccgcttcaacggtaatctccctgatatccgcgacatccgggaaagagcggaccatttcttcatataaaagatccatttcctcagcggtaatgcttgtcggcgtgccgccgccgaaataaatggtcgtcactttgatatcatgccgcttcagccattctccgattttctgcatttcatagtgaagcccccataaaaaggagccgactcttcccgcctgtccttgaatggcataagccggaaacgtgcagtaggcgcatttcgtcgggcagaacgggatgccgatatatatgctgacttcatctttgacccggtacagatcgggaaccgcagcgagctggcggtcgacgatctcctgcatcagattgattttttcatcatggatcagataatcttttttcagatcggcgtgcgcctcttcttttgtcaggccgctctgcagctttttatgaagaagtttagtaggcctgatgccggttaagattccccatttttgtgtcatgcccgtatgcgattgaagaagatttaagtagacgtacgacagcgtgtttttcacctgtttaaatacttctttttcgctccatccggcaagaagcggtttcgtatgatgttccttttcgccggttcctttgatttctccggataccgacacgctgtctgcatcttgagaaatggcaagtgagatgacgagatcagagggttcctccgtttcgccgtacgcaagaacacactcttcaaaaaataaattcgcgatgttttgcagcggacgatgcagcctgtcatccgtgatgccgtctatttttatttgcaatgtgatcaccttatttttcagattcaaaactttctttagtgtacagaaagaacaggctaaaatcaatccgcgaaaaagccgcagaccggcgtttcgcgtctgcggctcttgattacggccgtttcatatggaacttatcgagaaagcctttgcggtgctgcatgcggaaatattccttaatcatataggcgactccctgttcatcatttgaccttgtcacccaatccgcttttctttttaattcatttgaggcattccccatcgcgacgccgagaccggccagctcgatcatcggcagatcatcttcctgatggccgatagccacaacctcttccattgaaagcccgagatcagcggcgaccatcgaaagtccgctttcttttgaaacccctttaggcacgatgttcagtttttctccgttgacgcggatcacatcgacggccgggaatgctttcattatcgtatccgttatatcagcctgcaggccatcttcggcatgcacttcaatgacgggcgctgaaaccggctcatcaaggagcaggtcacttaatgattcgacaaactgcaccggataaaaaatcgggtcagacggatgaatcatcgttttcccgaccagattggagttcactttcttcttgtttccgatcgaatatttttcgtgaagaagccggatattacatggatagctttccagcacctgaacaatattaaacgtgtgatcttctgatattttcttttcaaaaaacggctcatctattttttcagaaatgtatgcgccgctgtgggtaatcaattttgcattcagctttaatattttcgccactttttgagcagagcgaaaatggcggtttgtgaccagtgtgacgtaaattccttttttcttgacgtattcgatggcatcctttgtcgtctgatgaagtttgccgttggagcgaagaagcgctccgtctatatttaacgccagcatttgttttgacacagagaagtccccctccttgatgactgtacttgtcattaggatatgaccctgtctctttgtttagaacaaccttttctccgcagcaaaaaagcctgcctcaagcagactttgaactgtcgttttgttgggatacgatcgatttgctgccttctccccaatgtgtatttctatttacgaaatatatcaggaaccccttatttgaccgttgatgcgctcgtttcacttactctctgttgctaccccttatcataccaggcagtataggcgaccgtatccttagatcatctgtaagtgtaggcgctttcagagttattatctcaattatattgttaaaaaacaagggtttttttaactaaaaaaatcagaggaaatatctatgctgaatgtatgataaagttgcaagggaacatacattctcatataataaaagaaaaaaagcggtgactgtcatgtctctattaaaagatatttataacgaagaatttgcagaagcacttctgaacagaatcaaatcggcatatccggcttttgagcgggacaagtgccgggcgctgatgtttcaggaagattggcccggactgacgttaaaacagcggatgcgccggatcacagactctttatatgaaacactgccgaaggattacatacgggcgcttgacgtcttatatgagacagctccccgcttctcagggctcgccgggattatttttcccgattatgtccaacagtacggaacggatcactgggacgaatcaatgaaggcgcttcagtatttcactcgtttttccacttccgaatttgcggtccgcccgtttatcaggcttgaccgggtgcggatgttcaaagagttcctttcctggacggagcatccggacgaacatgtcagaaggcttgccagcgaaggctcaagaccgcgcctgccatggggaatctccattccggctcttcttgaagatccttctccgattctccctgttctggaccgcttgatgaaggatgactcgttatatgtcagaaaaagcgtggcgaataacctgaatgacatctccaaaacacatccggatcttctggcagagatcgcagccgagcggttcggcagctgtccgcacacggactggattttgaagcacgcctgcaggacactgttaaaaagaggagacaaacaggcgcttgcggttttcgggtttgaagacgcctcccggatttcattggaacgttttacactgaattcggaaacggccgccatcggaacaagcatacatttttcttttcagatccgctcatccgcccggcaaaaagtcagggttgaatacgcgattgattttgtaaagaaaagggggcaccgcagccgcaaggtgtttaagatgtcggagtccgccatggataacggagacgtaaaaaccttcagcaaacatcattcccttaaagatttaaccacccgcaagcattatcggggaattcacactctgtctgtcatcattaacggtacggtaaaaggttcgcttgatttttctgttgaataaaaaaacccctccatttcatagatggaggggtgtggagcttattccgggctgccgtaaagctcttcaagaggtttcataatgattttgtttaactcgccgatcagcatgctcatgcgctgttccgcttccatcagctgagaaatcaattcatgctgctgtacgagagcaaccgttttttgtgcctgctctacttcttcctgagtgatttcttcacctgacatctgtttctgctgcagctgcagctgtacattgcggaagttatcaaacatgcgttttgcggattcatctgcgtttacttgatcataaagccctctcagacggctgtattcatcactgtttcgcaaagctttttcaagatcatatgctgcatcataaaaatgaactgccatagtaaccgctcctttcttcctttcggacataccactccactataacagactgcggagcgactttcatcatcggcgtatgttttccttagaaaagaatgacaaacaaagcctgaattgctccgattatcccgccgagcagaccgcctaaatacgttatcatcttaaattctctcttggaaatcgacagcaccatttcctccagccgttcaacgggaaactgatcaacctgctctttgaccacttcctcaagacgcagccgtttcagcacatcctccaaatgagcggcaatactgccgagtgccgcatcaagcagcttcggcgcgtacgttcccgtaatctccccttcataacgggagatgatgtcaccgagccggcattcgaaaaagggcgcggtttgaagtgcggccaaaacccgctttttcatgctgaacagcagatctttcgcattccacttttcatcggcctcataaagtgtataagatttgagcttgccccattcttgagaaagcagatcagccagaagctttttcgtttcctcattgcgcaaaaactttaacagctcaggcagcacacggtctgccaagcttgaattgccgaggaacatctgcaccatgctgccgagcatcccccgggaattcaaaaagtcgtcaatcatatttccgagcctgtctttcccttcttcgctctcaaaataatcaatgctccgcttcagaatataatctgcggccaacgggactttttcatccagcttttcctgaagctcatcaggaagccagtcttttatggcgcggtgctcatatttccggtacagttccgaaagcttttcatcggtaaaacggtcaatccaggcatccgtcttttcctgcggattccggatgcccgcggcggccaaagcttcgtgcaccgtcatctcggaagcggccattttttgtgtgaattgttcggcgaaaagaagcgcctggtttttaacggtatctgataaaagccgcttttttattccttccggggttaaaaggtggttcgtcaccatgagccccatttgttttgccaattcatcccgccttttcgggatcagccccggcgtaaacggaacccgttttccgaacaggtaatacggccggtacggacgaaataacatctgaatggcaagatgattcgtcaccgcgccgatcgcggctccgatcacaatcataaatagaaacgttcctgctatgcccattccttttcttctgcctccatcttatgttctattttcttgatgatatatctattcgtattatagaggctggcgggcatgcgggcaaatgaagaacctgaattgttgtttgtgaggaataaggcaagatgctgtttcgtactctttacagtagatcatcttttataacgcgcttagcatatttattggatggaagggccgttccatcagcggctttttgaataaagggggagtaataatatgacaacactcggttttatgtctgtatcccgccggcacgaggaagattacgccggggaattggctgaaagagcgcctcaatataatgtgcgcttagcccgctttacaccgtttgatatatttccggattctttgcgcgtgaaagcgctcgtctatcacccgcaaagcggaaagtggaacgaaacggaaatcgatattcccgaatatatttacgaccgctgtttttacggaaaatccgctgaagcgcaaaaagccaaaccgatcgtcgaatggctgaaaaaatatccgaaaacggaatttatcggccgggggcttcctgataaatggacggtcacggatgcgctccaaaagcatcatctgatcagtccctatattcctgaaacggccgaagtcagccgctatgaacaggtgcaatcatacttagccaaggaaaaagcatgtatacttaagcccgctttcggcgcgggaggcagaggcatcatcctgcttgaaacaggcaaaaaatcaattacggccacttactatatcggaaaaaacaaacaaacaaaatcattttccaatcacgtgtcttttaagtcttggtgcaaaaaagtgctgcagcaccgctatttgcttcaatcctacttaaatatccaggataaagagcggcatccgtgcgacatccgcattttcatgcgcaaaactgagtcaggcgtttgggaaacggtcggaaaagcggtcagaaggggttatcagaacggtcttttatctcatttgcccggaggatccgaaccgattaagtttgacacatggtttgaggaaattccgagaaagcagcaggccgttttattggatgatgtcttttcgatcacccaatccgtcccttatttccttgatgaacggttcgggccgctgtttgagctggggctcgatatttgttatgccaaagacggacgcatctggcttttggatgtcaactcaaagccgggacggaaagctattttaagcgtggctccggaggcgaaagaggatttgtatacgagtccgctgagacgcttccgcgaacttcagtcacaggaaagccggaaaggagtattaccgcgtgaatcataaagggatgattgtcggcatcgataaaaaaagcaaaaatacgctgtttctcccctcctccatgaaacgggaagggcttttatccgctgccttcgggaccaaggttgtcaaatgccgtgtagccttttctcaatcacttgaaaaaagcgcgctcctttctgaagatttgtttgaggagctgttgataccgcataaaagccgggctgactttctcatacacggccagacggtgcacatcggaccgctgatcggcgttttcacagccgggttcacatcatcgccgtcccgcccgttaagagaccgtacagccttcttttccaagatgctctctcttcatgaacaggcgaacggatattgtttcgttttcggggcccatcagatcaactgggaggaaggcaccgtccaagcgctgatttataaagaaaacagctggaaacggacggccgtcccgcttccgaatgtcgtatatgacaggctcccgagccgaaaaacggaagaagttccgcttttacagcagacaaaacaaaggctgatgaatgactatcagattccatggtttaatccgcaattctttaataaatgggacattcataagcttctggaaaaaaacagtctcaccgcttcacttctgccaaaatctgtcctgcacccgaatgcagaagcgttagaaacgttatgcagcacgtttgacaccgtctatatcaaacctgcagacggcgcactcggaacggggatttacaaggtggaaaaaacagatgccggcttatctgtcaaacacacgaatgaggaaaaaacggtggtgacggcagagtattcagatgcggcatccttcatgacatcatttaaagaaaacaatgacccgtccgcatttttaattcagcaaggcattgacctgatccggctggatgggcgccccgtcgatttcagggtgcacacgaataaaaacgccgaggggaaatggacagtgacggccattgcggcaaaaatttccggtgaaaacagcatcacgacgcatctcgcaaccggcggagaagtcaggacgttagctgaattatacggcgatccgcgagagagagtcggcatgatgcggaaactttcaaaagccgccttggcggtcagccgcgtgttaaatgagcacattgaaggttttatcggcgaaatcggttttgacctcggcgtcgatcattcagggaaagtttggatgtttgaagccaattcccgccccgggcgcagcattttttcccatccgaagctgagatcggtcgattacctgacaaaacggagaaattttgaatacgcgtcgtatttatcagaacggtccatcaccgccccggaaaaactttggcggtgaggctgtctttttttaggtttacccgggacaggcattgaacgatgagctacaatgaacaagatcaacatttcccataaggagcgtgaacgtcatgatttcgcacttcagctggaaaccgttattcaaaaaagagaaactgcccggatggcggatttcattttactggcagggtacgcattacgaagggatttatcataagtccggagacattgaatggggacacacacatccgggaaaagaagagccggctctcgtaaaagagctgcatgaattaatgctttatcacatatatgactgaaagctaaaagctcagccgcaccaggctgggcttttctttttccttccgctatttaccacaccgttttccgaatgagatgccgtttgattcaccataatacgtagtacaaagcggcaaacagcattgggtgaagccgagctggcaatggttttcattccgaaaaccatcggctggtgcaattccagcaaacccaaccatactactttataaaggagatcatacaaatggcaaacaacaactcttcaaacaacctagtagtacccggcgctgctcaagcaatcgaccaaatgaaatacgaaattgcttctgagttcggcgtaaaccttggcggagaaacaacttctcgtgcaaacggttctgtcggaggagaaatcacgaaacgtttagtatctttcgcacagcagaacatgggcggccaaggcgtacaataactcaataaatggcttacagaaggcgcgggataccgcgtcttcttttatgccgtcacccttttttcctattccacataccctaggaaaaaaggagggaaaacatgtcattcattgcctcagtcaattgggagctgtttcagttcgtaagtgtctctttggtcaatgaatatgttgcccaccatttcccgtttattcacaggtattcttttccccgctgctttgaatgatataatgagcggcgaggaggttttttacatgaacatcgctttactcggagcaacaggaagagtcggacaggcttttataaaagaagcgcagaaacatggacacatggagatattcgctcttgtcagatcagccggaacagtccttcccattcctgaaaaacaaatcataacagggaatgcgaggcggcgggaagatgtaagccgattgatttccaaagcggacacagtcgtgagctgtctcggcacggacggtgacgataccctttcagccgctatgacccatataatagacagcatgaaacggcatcatgttcagcgtctgattacgatcggcaccgcgggtatccttcaatcacggcttatgcctgatcaataccggtttgaatcggcagaatcaaaacgaaaatcaacaagagccgcaaaggaacacgcccgcgtatacgaaatgctgctggcagaggatcttgactggacgatcatctgtcccacctaccttcctgacggagacgctgccggagtttaccggttcgaacaggatcgccttcctgaagacggcgctgaaatcaccgtcggagacacggcgcactttctgtaccgtgagctgatcagcccgcagtttgtcagaaaacgggtgggactggcttactgaatgaaaaaaagggcgaatctttagattcaccctttccgattacaccgcggacttcgccgttcctttctgcaattcatacatttggtggtactgccccttttgcgccattaattcgtcatggcttcccttttcaataatgcggcccttttccagcacgagaatctggtctgcgtgtctgatcgtggaaagccgatgggcgataataaatgtcgtgcgcccttcttgaacgacttgcagcgctttttgaatgactgcttctgtttcggtgtcaatgtgcgccgtcgcctcatccaaaattaaaatggccggatcgaacacaagcgctcttgcaaaagaaatcagctgacgctggcctgaggacagtgtgccgcctttttcggtaacgggctctctgatgcccttcggcaaagattgcagaagacttgcggcgccgacttggcgaagcgcttcttccgcctgctccaaagaaatacgctgatcatcgagtgttacattggagccgatcgtgcccgagaaaagatacgggtcttgcagcacaatgcccatatgcgacctcagctcctgcctcgacatgccgtatatgcttttatcgtccagcaggatatctcctttttgggcatcataaaaacggaacagaagattcaggatggagcttttgccggaccctgtatggccgacgagggcgaccgtctcccctttttcagctgtaaagctgatctgtttcagcacctcttccccctttcgatatccaaaagaaacatcgcggaattccactgtcccttccgcctttctgtctgcgggagcgccttcttcttccgtttcctcctcctgtaaaagctcgaataccctggcggcagagacacgggccaattcaagcttcgaaaattggttgacaatccccgtaaccggctggaacaaacggtttaaataatcaacaaacgcgtataaaacgccgatcgaaacaattccggccgcactcagactcgcgcctccgaaataccagatcagcccgacaaacgccagattgcgcaacacattgacaagactgtgggacatgagggaatttaaggacagcattttgtttttgtagcgaaaatgagcttcattcaattcttcaaattccttcatcgtttccttttcgcggcggaacgcctgaataatcggcattccttgaatggattcgttcattttcgcattgatgttactgttaatggaacggattttttggttgaagacggatgcgtatttgcggtacacaaccgaccagatcattaaaatcggaataatcagcaggcaaacggcggccagcctgacgtcaagcataaacagcgccgtaaaaatgccgagcatataaacgccgcttgtgataaatgtcgacagcaccgttacatataaatccctgaccgcttctgtgtcattcgtaatgcgggccacgacttttccggcaggcagattatcaaagtagcggatcggcattttctgaatgtgtgaaaatacatcctgcctcatgcgctgtatgatccggttcgctcccatctgcagcagataatgctggccgtaatgaaaacatacggaaaacatgagcagtcccgcgtaaatggcggtcagcgtcagcaatccttttatttcgggacggtaaaattgaaaaatctcctgtcttgataacgtaatggcgggatatgacctgctttctttaccgtttgatattgtcagccggccgtcagacaccgaacggtttccgtcaaaactgacgggacggtcaacaaaatagtagcccgcaccgacttgataaatgtgcgcctctccggttttgtccgcccccggtttgagccggtcctccctgacataatcatgcccccggaacctgacggcgcccggatcgtccgcagaggctttaacccatgttttttcaatgccgagaatgtggtcgtcaatcattttttttccgataaacgggccggtcagctcagtgccgaccgcaataatgagcaggacgaccgcccatatcagcagcttcttatattgaagcgcgtaattccataatcttctcccggtcttcatgcgcccgtccccccttcttcaagagaggacagccgctgcctctcatattgttttcgataccagccgttctgcgccaacagctcccggtgcgtgcctctttcagacacccggccttcatccatgacgagaatgagatctgcgtgttcaactgccgagagccgatgggtggtgataatcgttgttttatgccgccgttttttacggatgctgtcaatgatggcggcttccgttttcgcgtctacggcagaaagcgaatcatctaatatgagaatgtcaggatcggtcaaaagcgctctcgcaattgagatgcgctgcttttgtccgccagagagcgctacgcccttctcgccgacaagcgtctcaagcccgtcggaaagcatgccgatatctttttcaaaatgcgcatctttcagcgcgctgccgatttcctcttcgtttgcatcctgccgtccgtaaagcagattctcttttacagtctttgaaaataaaatatgatcctgcggcacatagccgatccacccgcggagctcctcaagcggaatctcctgaatcggaacgcctgtaaacgtgattgctcccgcgccgggcggatattcacgcaacagctgcttaatgatcgtcgtctttccgcttcccgtcttcccgacgatgccgagtgtctgccctttttctacggaaaaagatacatcagaaaccgccggtcccgctccgctcggatacgtgaaagtcacttgttcaaaaacaagacgcccgggctccttgatgccggcggggtgcttgggtcctgtcacgtctggctcataggaaagcgtctcattgacacgatccaaggaggcatttccgcgctgcatgatattgattaattctccgatcgcaaacatcggccagatcatcattccgagatacacgttaaacgataccagctctcccagcgtcagccggttttgaaaaacgagataagcgccgtagccgagaccgatgagatagctgaggccgacgagaagtttcacagtcggttcaaaaagtgaatcgataaacgccaccttcatgtttttctcatatacatccgccgtcatatcaccgaaccggctgacatcatttttttcctgcacgaaagcccggatgacccggacgccggataccgactccagcaccttgtcatttaatgatccgaaagcatcctgcgcttccgtaaaccgctcatggatcttttttccgtacaggctgaccgcagccgccattatcggcagcggaataatcgcggcaaatgtcagcttccagctgatgagaagccccattgtcaaaaatatcgtcagcatatacatcgtcgaatcaacgagcgttaagaccccgaagcccgtcgtcatactgacggcctgcaagtcatttgtcccccgcgccattaaatcgcccgttctgtatttctcgtaaaacggcggtgacatttgaagaagccttcccatcagctttgaacggagaatcttctccatgacattcgccccgccgaaaagctgatacatccaaaaataagacagtaaatagacggctgccgttaatgcgagaaaaacacatatgtaaaacagcatcccgctttttgtaaacacgcccgccttcatatcgtctatcgcgttaccgagaagtttaggcggaaacatttcaatgacattcacaatcaataacagaacaatcgctgtcgtatagcgcagccaataggctttaaaaaaccacgcgagcttttttaatacagtaaacaaataccgtcatcccctttcatcaatcagccgccctcaagcttttccggattgtttttcattgttttcgctaataccgccacatgcatcacacctgtctttctttcatttttttgtataaaaaaagacatgaagcctcagctccatgcctcttattattataaataaggtacagacccgccgtttatgcgcgactgccccgtttttaagcaaatgttcagaaaacggaagctgtatgggagtcacgccggtattcagctgaaaatgagttgacaagctttagttttgacatgatccatacctcctttttccctatattgttccttcatcatataaacaaatcctttttttgtcaatgcaggttttacatttctgccattcgggtattgtaaaacaaaccttttttactgaaaggatgaggccgatgtttcatgcggaccggttgatagcagcttttgacggaagtgatgatagtaaaaaagcgctccaaaaagccatagacctttcaaaaacatttcacgcggatttaacggtcgtacattcccacaatgcaaaagatacccggacgattgttgatcccccgaggccgggagccggggcaacgtatatcggcggcgggattgcaagcgttcctgacccgctccaggcggaaagaatctcccctgatccgatgatttatgaagaccgtacggaagaaatcgttgcggaagcgagaatgctgatgaacgacagccagattgacggggatatcgacattttagaaggtgatcccgctgatgccattatcgagcatgccgaccgtatatcggcggatttgatcgtcatggggagccgggaccagaacaggctgaaaaaacttttattcggaagcgtcagtgaaaaactgtcatcgaaatccgatattcccgtgctgatcgtaaaataattctttctgtaaagcagcttaatcaaaagctgctttttttacagctcccggctgtttcttctttttttcggcatcacaaaaaaactcgccatgatcaaaaaatcgatgcacaatacgacagaccagccctttaacagcttgctgagcgcttcggtgcgggaagcgtcctgaatgagaaataccgttccggctaaaagaacgccgccgatgacaaacgctaatacatgtcttccccatccttttgcataatgtttggcataatccagcccgtaccgtttgaccggttttgccccttccttgaccacataatagcggaaccgctcatccgcccattgaatcatgcttttcccgaaggcgacagacactccgatataaatggccgccaccgcatgcgccatagtcgccgccgcccctctgtataaatcagctgcggccgccagaaacagtacggcatccaataaaggaatgagagcgaaaaaaaacattccgagcttttgccgcctgaatatatagcgcgccgccaatccgaagatgacagccgcccaaaaagcagcctcacaaatgacaatcaaccaagcaatcgcgttcaatccggttcccccttatcgttttctaaaatgcattgtatcactgctttttatttaatacaactgtattacaaaattgcaagaaaaaatatttcctgttacactggaaccatgcctaaaataatcgatcatgaaaaaagaagaaaacaaatagccgaagccacttggcggacgattttggagcggggaatggaaggagcgacagtgagaaacatcgcccaggaagcgggtctttctttaggcgcgctgaggcactatttcaccacccaggatgagcttttagggtatgcgatgacactcgtaaaagaaaaagcggccgccagaattaacgaagttgccatgaaagatctgccgccgaaagaaaaagcggtgcgtctgatgcttgaaatcatcccgacagatgaagaaacgatggctgaaatggaggtatggttcgctttcacagcttatgccagacataagggagaagagtttcaaccccagcaggacgggatcttagcatatatccgcggtctgattgactggctggatgaaaataagcttctgaaaccgaatcttgataaagagatcgaagcggagaaaatgtacgccatcgccgacggattggcgctgcatgccatgcttgaacctgagcgtctttcaaaagagaagatctcccgtgtgctcattcagcatatcgaatctctttttatctgactgaagtaaaaaggccggatgtgttccggccttttttcagcttatgactgaaccccgagctcctgctgaatgtgcgactgaaaagcctcctgaatcgttttggctacaggtcccggcgctccgcttccgaccggttttccgtcaagggttacgatcgggattaattcagccgtcgttgacgagatgaaaatttcatccgcatccctgagttcgtcttcggtaagagccttctcccgcacctcaatcccgttttctttcatcagctctaacagtttcatccgcgtaatgccgtttaaaatcagctcatttgcaggatgcgtccggacagtgccgtttatgacggcgtatacattggaagaggttccttccgtgaccgctccgtcccttatcagcaccgcttcataagcgcctgcttcataggctttttgtttaatcatcacattatacagtaaattcagactcttaatgtcacacctcagccagcgtttgtcttctgccgttatggcctgcgctccggctttttgttcattttccggttttttcactgaaaaggtatatgccgtcgtctgcggttccaaaccttcgtcatactggtgcttgcgcggcgccttccctctcgtcgtctgcatatagaccccgccgtcaatgagtttgttttcctgtacaagcttttgcagatcccattctatgtcctctgcggagaacggcagggtgatgccgatttctgcggcgcttctgaaaagacggtcgatgtgctcacgcagaccgaataaggcgccgttatacactctgatgacctcatacacaccgtcaccgaattgatatccgcggtcctcaatatcaactgccgcttcttcacgatcaatcaactggccgtttactaatgtcttcatgtaaaccctcctcatcgttatctgccgtgatgtgcattctcagctgttattgtcaactattctatcatactgaacgagccggctgcggagtttatttttttcttaaaatcttattattcgacatcttttctatgtcttttccagttttgttcctgtatacttgattcgacatacatatgctgttaacttatggcacttcgcaagcctccgctgttatcggcattatgcagaaacttatgctactggagagattgttatgcgcaacacaaaagaaggtgcttccccttctctgttttcattggcttttaaacttacgagtttagcagttttgtgcggactgcttctggtaatcgtcataatgggatattccgcttccgccgcaaaaaacaaacaggtcaccgtgaccgcaaacgggcagcttcgggatgaagcagaaagcctgcggctgaaaaatgattctcccgacgtcttaatgaaacatttgcagagagagcgtgacccagggaaaaaaacggtatatttaaccttcgacgacgggccgtctccatatactgaacagctgttgaatgtattgaaggcaaatggcgcaaaggccactttttttatgcttgaaccgcggatgaaagcctataagcattccgtgcaaagagcgaagcaggaaggaatcgcgctcggcctgcacggcgtgacgcacgataatcacctgttttatcaaacaccgacatcaccgctgaacgaaatgcagcagggacgcgatacactcgaggcaatcaccggagtaaaaacggatcttgtccgcacgccttacggcagtaaaccgtcattgacggatgcccagattaagaatctcgaaaaagacggattcgtgtactgggactggacgatagacagtgaagactggaagtacaaaaacgcacggtacgtgccggaagtattgaatcagctcgcatatttggaaagcgttcatacgagcaggccgcatgtcattttaatgcacgatctgcctgcgacggtgcacgctttgccgagcctgattcaaaaactgaaagcccagggctactcctttgatgttctgacggatcaaatgattcccgtccatgaataagaaaagccggatctgtatatgatccggctttttttatgtcgcggcgctgatccgttttgcaaattcaccgatcttctcatggatgacaagatcaaataaatggtcgcaatatgtcggctcaaggttaatgatcacctgcttcaaaccgggaatccgtcccgcatcctcagggacaaaccttgccggcgccacttcaagcgaagtgccgatcacaagaagaagatcagctttatcaagcttttcataaagggtttcaaaatgctgaacgagatcgccgaacagcacgacatccgtttttaatacggtgccgcataccgcatgatcaccgatttccgccgtacattccggcacttcgtccttcagcagatgagaaagcccgtagcgcgctccgcagcgggggcatgcggcggtctgaattgaaccgtgaagctcatagacactgctgcttcccgctttcttatgcagcccgtcaatattctgcgtaaaaatgtctacctgctttccccgcttttcaagatccgccaaatacgtatggccggcattcggctcatagcttccgctcattttcatctgaaagagctgtttgaatttaggccagaattcacgcggacggcgttcaaaggattccctgctcatcgcttccattctggaggtgtcttcggtccatataccgcccgccgaacgaaaatcaggaatgccggattccgtgctcattcccgctcccgtcagcaccacgatacgttccgcctgattgatcaatgtcataaacgcttccactcttccaccgccttttctttttatcatatcatgaaaaaagaacggcgcctgttatgcccgttctttttctccggaatgatccttcacatgaaccggatcatcgtggcttttctgttttacgaatacattctggcccggataggcgaattccacgccttcctcagcaaaaatatcaataatccggcggttgatatcctgccgcacgtccaggctttccgcccagacgatggtctttgtgtaaaagttgaaaaacagattgtaatagctgtccgcaaacacgtcaaagttaaccataatcgtatcatcatgcacgccttcatgttcacgaagcatttctctgagccttgtgatgcaccgctctaaacgatcaatcggcgtcgcataagaaacacgaacggaaaacgtgacctggcgcttcgtcatcctcgtccagtttgtaatggcttccatggacagcgttgaattgggcacggtaacaagcgccccctgcgccgtgcggaaccttgtgcttcggaatgtgatatcttcaacgccccccgttacagatgacgtctcgacccagtcgccgatcgtaaacggcttttccgtaatgatgataatgccgccgaaaaaattgctgatcgtatctttagccgcaagcgcgaaggccaatccgccaagtccgagtccggccacgaacccgtttacatcataattgaattcctgcgcgatcacactgacgctgagcgcgagaatgacaaagcgcagcaccttggataaaaacggcgccaaaatgtcatccatatcaagctcaaagcgctgattgactttatgaaataaaaacgaagacgccgatgtcagattgcaaagcccccaggcgatcagcgcaacgatcagagagcggtacaattttttggcaatgtccatctgcccgtctaaaaacggcgaatactcaatcgccaaaaacagacccagcgccacgaaaaaccacctggccggcttgtcaaacgctacggcaatctgtttgaatatgtcggttttcggcttgtttgccaatttgtaaatgagctgaaaaaagtatttgacaaacagttttctcaaaacgagaaaagccgctaaaattccgatgctgatactgatctgcaaaatatggtcaagagtaaaaaagctctgaaattgtgtcatcatggcatatgctcctttgtcttgtcgaaaatctattatactaaaacattcggacatcagcttcttttaatgtctttaggcagcctgaaaaaccccggcatcagagcacagccggggtttttcacacattcgttcatctttcagccagatacaacagggtcaggcactatttcttctttgattgtgtctgtttcaggagagtcgctttttggatttcagcatcggtttcggccttaattctttcttccactttcaatctcccttttcccatgatctcgcctcctttttgccattataaatcatcactgcggattgtaaaccgaaaaaagcactatctttattccaaaaaaatactgtttcgcacattcaccagtttgaatcgctgtgcatatacgaatctgatataataacagaaatgcccatgaggggagctgacaagcttgtataccatcgctcatcgcggcgcatccggttacgcgcccgaaaatacatttgcggcatttgatatcgctgccgaaatgaacgctgatttcattgagcttgacgtccagctcacaaaagacggccagattgtcgtcatccatgatgacaaagtcgaccggacgacggacggctccggttttgtaaaagattttacgctgaagaagctgcagtctctggatgccggcagctggtatggggctgagtttaaaggggagcggattcccctgctcgaagaggtcttgaagcgttatcattctgaaatcggatttttaattgaactgaaggggcacgtttctcaagtcggtcttgaaaaagcagtcggccagctgttaagcaggttttccttttccatccaccctatcgttcaatcattcagcctcaagtcaattcagacctttcacgacatgtatccgtccgttccgactgcaataattgcaagacccagcttcgggatgttttccaaaagccagctggccgcctacaaatcagccgtaaattatgtcaatattaaatatacccgcctgaatcggttcttgatttccaccgctcacagacacggcctgaaagtatttgcctggacggtcagaaatcaaaagacggccgaaaaactgcaaatgatggcagttgacggcattgtaactgattttccggattttatttctaaggatggctgatatgaaacaatatatcgcaatttttatcggaggcgcgcttggcgcattgctccgctttgaaatgagcgcgcacattcacagcggttctttcccggcggccactttccttgaaaacgcggcgggaagccttttactcggtcttattacgggttttttcatcattcgggctaaacgccctcttttgaccgcctttttaggaaccggtttttgcggaggtttcacgacgatgtcaaccttcgcaaaagaaaccatttttctgctgcaatcgtctcccgcagcggctttttgttatgctgccgcgactttattcgctggtcttgcccttgcatacgccggcattttctggggacggcgtattgcccttcacgcagcgggaagggggcatgatacgccatgacgatcgtcctgatgcttatcgcagcgggtatcggagcggtattacgttctcttttgggtaaaacaatttcagaaaaaacaaaaggttttccgatgccgcttggaatggctgcggtcaacctgctcggctccttcggcctcggcatgttcaccggcctgggcctggataatccttctgccggcatcatcatcgcgacgggctttttcggtgcgtttacgaccttttccacgttcagtattgaagccgtgcagctgatgatgaacaaccgcattaaggaaagcctgctctacatcgctgtttcagcagccggaagccttttggcgttctggtgcggctttgttatgatatccatgtaaaaaaaccttgagcttatttttcgctcaaggttgcgttatgaagcatgaccgtttcaggcacgggcagctggcggtttattgttccctgaccgcccgggcggccctgttcttctttgagttcaagctgtttaataaaccggccgtccatttctaatatgagggcagtgtatcccccgatttgtatcgactcacccgcacagatgtcaatattccgtttcagcacaagaccgccgatcgtgtcgacttcctcttcaatccctgcgccgagaagatgattcacctgatcgatccgaacctttccgtccagcacataatggcgttcggacagcttttgaatctgcggctgttcgtcctcatcaaattcgtctctgatatcgccgacgatttcttcaagtatgtcttcggtcgtcacaagaccggacgttccgccgtattcatcagacaatatcgccaaatgaatccgttctctctgcatttttatcagcaggtcgtgtatcgggatcgtctcgatgacttcaatcaccgggcggacgtaagacgtgatggatacttccgctttttcatcttctgtcataaacagcagatctgaaaagagatgcttcgtattgatcatgccgatgacactgtctttgtccccgtccgttacgggccagcgcgtatatttgtctttcagcatcatatcaagcatttccggcacgtccatatcagtggaaacagccgcgatttcttttctcgggatcatgatttccttggcgatccgattatcaaaatcaaaaattttattcacaaacgtatattcagacggattgatttctccgttttttaaactttctgacagcaggatccgcagctcttcttcagagtgggagccttcatgctcagatgccggctttaatccggccaaaccggtcagaattctcgcggagccgttcagcacccaaataaacgggaacatgaacacgtaaaataaccgaagcggtccggcaatccataacgtcagcttttccgctttttgaatcgcaaccgttttaggcgcaagctcaccgacgacgacatgcagaaacgtaatcagcccgtacgccgcagcaaaagcaatcacatgctcagcagaatccggcagccccatgccctgaaacacaggatgaagcatccgctcaaatgcaggctctcccagtacgccgagcccgatggatgtgagtgtaatgccaagctgcgacgcggataaatactcatcaagatccgtaatgatacgctttgcgagcaccgcccgtctgttcccttctgaaatgagctgatcgattctggatcttctcactctgacgatcgcaaattcactcgccacgaaaaatgccgttaacgcaatgagcacaccgattaaaatcaaactgtcaatatcgtccatttcaccttatcccgaattaaaggataaggacgtcacctcctgatttcatcgttttttcttaagcgagaggaacgaaatgggtgattgactacacagagggccccatcctgccacctcctaagtcaaagcatgattgtcatttgtatagtttattgtatcacaactccattctttcatcattttcagatttttatcatataaaaaacagccttcaaaaagaaggctgccgttatctgcttcggaaatgattttctaaacaaagcgccgtattaatccccccgaatcccatgcttaagcttaacgcatggtgtacggtatgggcgctcggcccgtcggtcacccactgaaatgaatcgtcaatcggctccgttaagtttcggatcggatgaagcttgttttcccgcatttgcaagagagcagcaatgatttccaccgttccggccgcactcagaccgtgtccggtaatcgattttgtcgcattaatccgcgcgtgcgacaggccgctttcagaaagcgcccggcattcagtcttatcaccgatcggcgaaccggtgccgtgcgggttgatgtaatcgatctctttcgctgaaaggccggctcgctccagcgcctggcggatcaccgtcatttcgccctctgctgaaggattcgggttgcggttcgcatcggaagccatcccccagccctttaagccggcccacgatcgtgcgcccctctcttcggcagattcagcgcgttccagcacaatcgccccgcacgcctctccgaatataaacccgtccgtatgccggtcaaacgggcggcaggcggcttcaggccgttcagcgtatgtatcagtgcccatcgctcccaaagaacggagagcatgacactccatgtacgacagatcggccagcgccccgatcacgatgcaccggtcaaacaggccgcctttgattccttgagcagcctgaataaccgccgcctggccgcttgccgacgcgccgccgaccgtaaaggccggcccttttatcccgaattgctccgtacaaagccccgacaaatcactatccataaaagaaagcccgtatgtcggatttacaaattgcggcgtttcaccgtttttctcaaaggcctgcagcaattcgcgctgcgtcatattcgagccgccgataatcagaccggtgcggctgtgatcagcgccgtctaattgagcgtcatgccacgcttcatataaagcgataagcgccgtctttcccgataatgcggcccttcggtacaagcgcttcgacagcgcgtccggcggcgttaattcgctaagctccgcgccgataaacgaactgcctttctgccggccgggccgtttcatcacatcaaaggcgtgccgcccctccataagcgcatcgagaaacgcctccttgccttgtccgaccgcggttaagactccgattcctgtaatgctgatgtctgacgtgccattattactcctcgacatttgtccgttctcccatctttatgtattggaagctatgaagaaaaatcttgatacagtgctttgaaaatatcgcgcgactgtctgatctgttctgaaggcacgctgaaagataatcggaaatagccgctttttccaaatccgctgccgggtacgatcaatagtttgtatttctgtgcggcatgcatgcagaacgccacctcgtcttcaatcggtgatttcggaaagacgaaaaagcctcctttcggcatttcaaattcgaagccggcttctgtgaggatgtccaccataaggtctctccgctttctgtaaggttcagcgtcaatcgaaagatcatccattttcgccacggcgcgctgcatcatgaccggagcgttcacaaagccgagcgtccggttgcagaaaacgaacgcatccgtcagaagatcgccctcaggcatttgggcgtctgccgcgatatacccgagcctttcccccgcaatgccgagatctttactgaacgaactgactaaaatcacgcggtgatacgcctgaaacggattcgcctgctcttctccgtagatcagctggctgtacggttcatcaaataaaataaatatgctttggccgttccgctcttcggcttcttttaataaggcgcccaattcgttaaggtttttctggctgagcacagtccccgtcggattatgcggcgtattaacgatcagtcctttcgtacggggggtgatcgcacctttaaccgcttcaatgtcaatctcaaatgagtcagtcagcgggcagatgacgggtctgccgtggtaattttcaacatacgctttatattccgcaaaataaggcgaaagaaggatgacttcttcctcggggtttaaaatacttttcagcgcgacattcagcgccccgccggctccgaccgtcatgactgtatacctggcggaaatttctgtctgaaaccgctctgacaaaaagcgcgcaaccttttctctcgcctccggaagcccctggttttgtatgtatccgtgccgccctgtttcagccgcttcgcaaagcgcctttttaaatgtttcaggcggctccgcaaccggatttcctattgaaaagtcaaacaccttatcggcgccgaactcttttttcagccgagcgccttcatcaaatagtttgcgtatccatgaacctttctccagattctgtgtcacttcccgtgataaaccggccactgtcatctgtcccttctgtctttttcttccgtttctatttacaatgattatgaaagatttacatggcgcagtcaacgctttttcagacagcccgccgcgccgtttcaggagaaagacggaaaacaataaacttgtgcaaactccccttcatatattaaactattctcataactataacgtgatggttggggagggatttagatggggctgagacttatcgcatcagtgaattagcagagcttgccggtgtaacgaaacgcacggtggattactacacaaacctcgggcttttaaagcctgacaggtcttgttcgaactatcgttactacgatacacttgcacttaatcggttaaagtttatagtcgcttgtaaaaagcagcgattggccctgtctgatataaaagatcgactggagaaccagtttccctcttcagccctgcctgacgatattggaaatctggcatcggaaattgatcacatgaatcaaaacatctccgtgatcttgaatcggtttgaaaagcttgaaccagaggagcgcgcccagctgaaaaaaaggctggctcctgaaaagcttgcagtgcttcaatcatttatgctgctgttaagttaaaccattatcttactaacaggaggtgttaccttcatcttcccaaaagaagtgaaggttctaattggacattgtgaatttgattttagtcgcggttttaatcgcgctgacggcatttttcgtagcatctgagtttgcgataatcagaatcagaggctcacgggttgaccagcttatagcagaaggaaataaagccgcaatcggtgtcaaaaaagtgaccacgcatttagatgagtatttatcggcgtgccagctcggcataacattgacttccatcggtcttggtgtcttaggcgaatcaacgattgaacgcttgcttcatccgcttttcacaaagataaacgtaccaagctcattatcgcatattatttcatttattctcgcctatgcgatcattacattcttacacgtggtcgtgggagagttggcgccgaaaacagtcgccatccagaaagcggaagccgtttcaatgctgttttcgaaaccgctcatttggttttaccgcatcatgttcccgtttatctggcttctgaacaactccgcccgtcttttaacgaaggcgttcggtcttgagacggtgtctgaaaatgagcttgcccactctgaagaagagctgcgcatcattttatcggaaagctataaaagcggtgaaatcaaccagtctgaatttaaatacgtgaacaaaatctttgaatttgacgacagacttgcaaaagaaatcatgattccgcgtacggaaatcgtcagtctgccgcatgatatcaaaatttctgaaatgatggacatcattcagattgaaaaatatacccggtaccctgtcgaagagggtgacaaagataatattatcggcgttattaacattaaagaagtgctgaccgcctgcatcagcggcgaagtatcagtcgactcgccgattaccgattttgtcaatccgatcatccatgtgattgagtcggcaccgattcacgatctgcttgtaaaaatgcagaaggaacgggttcatatggcgattctgtcggatgaatacggcggaaccgcggggcttgtcaccgttgaagacattattgaagaaatcgtcggggaaatccgtgatgaatttgatatcgatgaaatcaacgaaatccgtaaactcggcgacggccattacatgcttgacggcaaggtcctgattgatcaagtgaacgaactcctcggcatccatttggaaaatgacgaggtcgacaccatcggcggctggttccttacccagaaatacgacgtcgaacaatacgactcgattatcgaagaaggctgtgaatttatcattaatgaaattgacggccaccacgtcgcatatatcgaagtgaaaaaactggcgtttgatgaactgctggaaaccgccgaacaaaaagaagcataacaaaaaagcttgcgcgtctgatacagacggcaagctttttttcatttacagttgttcaagttttttctcaagctctttaattctggcattcagctcttctgtcatggccgcaagcctctccttcggcgcaagatcggaaaagtcctccaaaaaaatcggctcgccgatgataagccgcatttttccctttttaaacagcgcttttcccgtagacggccctttatatgcggccggaacgagcggcgcttttcccatttgggcgatggtcacggcccctcttttcagcgggacgtcttcagatgttctcgtgccgctcggaaaaatcccgacaatctttccttccttcagaagcttaatcggcgttttaatgctgcttgggcccggattttcacggtcaaccgggaatgcgtgaatcttcttcaaaaaacgtccgatccactttttctgaaacagctcttttttcgccatataatgaatctgaaggggcaatatcccgacaccgagcgtgaggacgtccacccagcccgcatgcgtgcacgcgataacgaatcctttatcagacggaagattctctttattgtacactttcactcctccgcgcagggatagaatgcatttgatggcatttgcacaaaacttatacataacgcacttcctttgttgtaatgatcaaaagtgttctctctctctattataacaatattttttattacctggtactaataattatatttttcctccgccgatctctatcttttatgacggattttgggtactatagagaaatggtgtttgatgaggtgaaaatgaatttaagccgtttgcatggaacgtgcaactttaaacctttcttatgcgtgtataacatagaggggagaaaaggcagtgacgatcgatgaaatttaccaaatgtatatgaatgatgtttaccggttcctgctctccatgacaaaagacaagcatctcgctgaagatttgctgcaggaaacctttatgagggcatacatacacattcactcctacgaccacagcaaagtaaagccatggctttttcaagtggcgagaaatgcgtttatagattatgtcagaaaacataaaaaggaagtgaccatttccgatgacttaattgggagcctttttcagacggctgttcaaagcccggctcatcagattgaaatcaaggaagtgctgacagggtatatgtccgaacttcccgacaattatcgggaggccttaacactgtattatttaaaagaactgaattacaaagaagcatcccatattatgaatatttcagaggctaattttaaaagtgttttatttcgtgccagacagcggctgaaagcactttataatagaggtgttaatgatgaatgaagaatttaaaaagcgtttttaccaatacaaaaatggagaaatgagcgaccgggaaatggccgcctttgaagaagagctggaaaagctggaagtctatcaggagttgattgaaagcgaaatgcaggacgaccgggaatgggacgtcggcatcagcccggaaaaacagaaggccattttatcatacggaaaacgcaaatcgtatttgcggatttcagttctcgccgtcatctccactttgatgattttgccgctttgcacattaggaagctacctctattacggtctgggaggaaaagaaagcaccggcaatcaattaatggagaccgcggcagtgacggtggcgaccacaatgccgaacgtcctcgtcgatacctccggactgaaaagccaggtgaagctgtttggaatgaatacggaatttccgctgcaaaagcagatcggcacaaaaacgaaatccgtcggcggagaacggattgaaatgtttttagatacggtcaaatcgcctgccgttaactactatgatttagacgcggcacaggcaaagcattatttcgcccatccttccggcttaaaggaacgcacgattgaaaaagccggacagacattaaaaaaattgcctgaaggaagcgtggcggaggtctatctttcttatgacagggcctacccttcttctcaagtatattcgacttttaaaaaatacgatgtgaagtttttatggaacgcggtcgaaacggagaaaaatctgaaagacagtccttatgccgagccgttaggatttcccgggaaagattccaagatggtgtcctctttcgaaacgcaaggacagacagaccgtgaacaatttatcaatgcccttgaatttatgtcccgccataaaaaatgggcgcatgcaatatcgaaacgcaaagacatgaatcttggcagccgaatcgactatgttgaacatcacggaatgaacgtatacggctctgtcgtgacggggccgacaaaagaaatcgaacgtctgctgaaaaacaaaacagtaaaagcagcaaacatcggtgaggtggaattatggaattggtaagaatttttaaagagcataatgttttcggctggatatcagtcggtaccgcgattttgtcgctgctgcttttgaacgtggcaatcatcagcaatgtgactttctattcttatcagatgctgccgtttgcgatggccgccgtgccgttcggcatcattgagctgtttattaaaaaaggacggacgggcccgggactgctcggtgtcattctcaatctgttcgtcattgtctgtgtatatacgatcgttgcggttgatacgaatctgcaattcggtttttaaacataaaaacaggcccttttacgggggcctgtttttttaaaatgaaagaacgccgattaaatgcagcaatacgacgatgatagccagcggcacgagatatttcagaaggaaataccacagctgaaagaaacgatagccgatggcggaaccgcttttcatctcggcaaacagctcctgcttcggtattttcagcgggacgaagattgatattaataaagcgccgagcggaatcagcacattgctgacggtgaaatccgcaagatcaaaaaacgtttttccgaacaaatgaacatcaccgagaacaccgtatgataaacaggacggaattccgactaagaaaatgagcagaccgcttgtccacgacagcttctttcttttcgtttcatcacctttcccgacagtcgccacgataatttccaccatcgaaaaggccgaagtcagcgcggcgaagaaaaagaccgccaaaaagctgataaaaaacagcgagccgaacggcagccggtcaaacacagccggcagcacggtaaacagcagtgtaggcccttcatccggtttaaagccgaacgaaaaaaccgccgggaaaatggccagtcccgcaaacagcgtaacgagcacattcatcataacaatggaacccgccgaacccggaagattttgggttttcggcaggtacgaactgtatgtcaccatgaccgaaacaccgagcgttaatgtaaaaaacgcctgtcctaaagcatataggatggattccggcgtcaaatcttcaaagtgcggaaccaataaaaatctaatcccctcaacggcatgatcgagcgtgactgatcgcagcacaagcaatagaaacagcacgaataaaatcggcatcagcaccgcactgacacgttcaatccctttctgcacgccttttgcgacgaccgccaccgtcatgatcataaatacaagctgcgcaatgagagtctggatcggattttcaatgaccgtcccgaacaccgtgccgtactgctcctgagtgagcccggataaagaaccggtaacggcttttaacacataaagcaaaatccacccgccgacaacactgtaaaaagacaaaactaaaaaacaggccgccacacccacataacccgtaaggtgccataccgacttcggcgcggcttgtttgtaggcatcaatcgcatttgtctggctccgtcttccgaaaataaattcaccgagcaaaagcggatagcctaaaagcacggtaaagaggacgaatataagaaaaaaagcgcctcccccgttcgtacccgctacgtaagggaacttccaaatggctcccaggccgatcgccgaaccggcagcggccataataaatcctatttttgaggcccattgaacccttttttggtcagacacgactttccacttcccttccgccctatattatcccttattcgctgcgataacttaagcccatttcaatatgtttcattattccgaaaaataaaaaggagcggcgggtgccgctccttacaaatccccgtttaatttcgaatgctttctcgaatataagaaataaatcaccagaccgatgatcagccagataaagaaacggaatatggtggtggcgccgaggttaataatcaaaaacacgcagaacagaatggacaatatcggaataaagggaacccccggacatttaaaagcccttggcagatcaggctgtttctttcttaatacgataactgccactgaaatcaggacaaatgcggcaagcgtgccgatgttcaccagcttcgccagttcatcaagcgggacgagcgagccgagtaatgccgacaggatgccgaacacccatgtcaccacgtgcggcgttttatgcttcggatggacttttgaaagcgcccccggcaccaaaccgtcacgggacatggcaaacattaccctcgtctggccgtacagcatgacgagcatcaccgttgtcatccccaacactgcgccgatatcaataatcccggccacccaattctgtccggccatctgcaggacgagagacacgggatggtcaacgccttcaaagcgggcaaacggaacgacgcccgtcataatcgccgatacggtcacatacagcacggtgcagacgattaatgaaaagataattcctttcggcagatccttcgccggatttttcgtttcttcagcggcggaagagacggcgtcaaaaccgataaaagagaagaaaacgagcgccgcggcactgaaaacaccgccgaaccccatcggtataaacggctgccagttgtgaggtttgacatatacggccgcaacggcgataaacaatagaacaaccagaaccttcaaaatgaccataatattattgacccgcttcgattccttaatgcctaaatagaggaggaatgtaatcgcaagcacgataacaaatgcggggagattaaagaatgtgaccgtgcctttaatagatcccggcgcggccgttaatgcagtcggaagatgaatgccgaagcccgccaagaatgattgaaaatagccggaccagccgaccgaaaccgcgctgacggcgagcatatattccaagattaaatcccatccgatgataaacgcgagaagttcacccagtgtcgcataagtaaacgtgtagacggaacctgaaaccgggacgcttgaagcaaattcggcatatgacagagccgcaaataaacacgcaagagcggcgatgacaaatgaaacggtcagccccggccccgccgtgacagcgcctgttccggttaatacaaaaattcccgttccgatgatggcccctatccccagaagggtcagatcaaaggcccctaactctcttttcagcgacttgtccccgcccgttgcggcaagcaggtcctgaatgcttttctttctgaatacgctccccttcatctgcttcactccttgtaaatcaatatatgttagaatattcagataacaatagcaataatgactaaattcttatttttcgcatgaaatgtttcagcacatcatccctttctcctatgtcatattatagcgaaaaatataaaaatgaaaataattttttgaaaattctatatattatttttagttttcataaaacagaacgcagcggattctccactgtgaaatattaacattagtgattcagctggagacttccattttttgaaaatcgtattcatatgtacgttcaaataaaaatcccgccctttttaaaagcgcgggataagacttgcgtattatgttgaaataaatctgccgccatttacgtgaatggtttgccccgtcatataggaagattcgtctgaagccagaagcacgtaagctccggcgtgttccgcaggctgtcccggtcttcccatcggagtgtccagaccatgcttttccaccttttcttcagtaaacgttgccggaatcagggcggtccagatcgggccaggggccaccgcatttactctgatcccctgatcggccaatgacatcgccattgaacgcgtaaaggaaacgatgccgcctttcgtgcacgaatagtcgatcaatgatgtgtctccctgataagcggtaatagacgttgtattaatgatggcgctccctctttgcaggtggggcagcacggcttttgtcatatgaaacatagaaaacatgtttgtacggaatgtcttctccagctgttcagctgtaatatcaagaatcccgttttgcggatgctgctcagccgcattattaacgagaatatctatttttccgtagtgatctaagacttgccggaccgccttctgacaatgcgcctcatcaccgacgtctcccggaattaacaggcattcggcctggtattcttccgcacgctttttcgttctctcggcatcggcatgttcgtctaggtacaggatggcaagatccgccccttccttcgcgtaagcgatcgcagccgctgcgccgatgccgctgtctccgcccgtgatgacggcgacttttccttttaatctgcccgacccttttacatccgggtcctccaagagcggtttcggctccatgtctgactcaatgccgggctggcgcttttgcacctgcggcttttgtccttccgtctgtctgtccatcggattcatattctcacactcctgcaattggtattactgagacgataccacgcagtgcggggagttaaacggacaaatatgccggtaattaaagctgctgagccgtttcgggaaaagcgccggtgtatttcgcagacggcctgtaaatcatgttgtcagcggactgttcaagcacgtgtgcgcaccagcctgccattctgcttgctgaaaaggtcggcgtaaacaaatcattgtcgacatcaatggcctgcatcacagccgctgcgtaaaactccacattcgtatacagcttccgtccgggcttatattgctctaacaggcggatggcttccttctccacataaagcgccaagtcaagcgacggatcatttcccgccacttcttcagcctttatgcgcagcgcttccgcccgcgggtcttttgttttgtacaccctgtgcccgaagcccatcaggcgttctcccctcataagcttcgctgccaaatacgcttctgcattttcttttgtcccgatgtcttcaagcattttcgtgacgcctgaaggcgcgcctccgtgcagcggccctttcatcgtacccagtgcggcagtgacggcagacactaagtccgattcagtcgaaacggtgactctcgctgaaaaagtcgatgcattcatcccgtgctccatcgccagaatcatatacgtctcaagcgctttcttttgggctgcggacggctgcctgcctgtcagcatatacaaatagttttcaacgtgtccgtatcgcgcctcaggtgacaacgcttcctgcccttgtttacggcggtatctgtacgcaataatcgtcggtgtgacggcaatcagtttaaccgcttcttccggcttgggcggatatgtaaatgaatctgtgcccaaacctgaaacagccgttctcagcaccgccatgtcgtccatttcatccggaagcgtttccagtaagtcgatcaaatgtttcggaagcccgcgctcggctgcaagttcttcctgaaacgcaagcaattgccgctcatcaggaagcgccccgttcaaaatgagatacgccgcttcttcaaaactgaattgcagcgcaatatccttcgcatcatagccgcgatatattaaatgccccttttctccgtcaatgtggctgatagccgtttctgcacaagtaatccctttcaatccacgataaatcaatttcattcccccttatcctctttctgttattatagtaaatataatatttaaaaaataatgaatatttttaagggaattaattaaaacttttaatcagaggagtgcatctatggattttaaatggcttcacaccttcgtcaccgcggcaaaatatgagaatttcagaaaaacggcggaaacgctttttttatctcagccgaccgtcaccgttcatataaaattattagagaaagaaatcagctgcaagctgtttcagcgaagcggccggaaaatacaattgacggaagaaggaaaagcatacgtgccgtttgccatgaggcttttggaagactatgaaaacagcatggcggaactgcacagggtgcgccagggctactcgcacacgctgacactcgctgtttcgccgcttatcgccgacaccgttctcccgtctgtcatgaagcgttatacagaggacaataaagaaaccgaaatgacggtcaccattttcgaatcggaagaaatcgcctctcaaatcagaaacggctcagccgatatcggactgagctgcttaaaggtgcaatcatcttccctcacttgccgccccctgtacaatgaccccgttgtcctcgtcgcgccgcccggccgaaaacccggaacagggaaggcggatgaagtgaaagacctgttcggacaatatctgcttttgacccacaaccatcctgactattgggatgatttgctccgccaggtcagaatacagttccctttcgtcaggacaatgaaggtgacacagacgcatattacgaaacgatttattaaagaggggctgggtgtctcatttctgccgctgtcagcggtacgggccgaactcgccgcaggcagcatgattgaaattccgtgcgaattcgcccagatgccgagcgcgggcgcatacgccatcgccctctatgaaaatgaaaaaaagaaaacctttttagattttttatcacattttcatttttaggtgaaacaaatggagctctgtcccgtctaaataaaaaacccgttctgatgaacgggtttctatcgctgctagaatcttttcgcgcccaggtagcgcggtttccagtagctgttattcagatcacttgttgtgacgccgtcagaaccggcatggatgaacttgttgtttccgatgtacacacccatgtgtgaagggccggcctgatatgttgtaaagaagacgaagtctcctcttgacgggctggacacgctcttcattgagctccagtatcccgcagtgctcgttctgccgacactcgtctgtttgtttaacaggtaccagataaatccgctgcagtcaaagccggaagtcgttgttccgccccatacatacggcgtgccgattaaagattgcgcatcagaaatcagcttgtttacattcaggctcgtctgtgcagcattatggctggatgaaggctgctttgatgacgaagatcctgaagacgttgaaccggaagttgatccctttactttaagaacttgtccgatgcggatcaggtccgtttttaaaccgtttaaactttttaattggtttaccgtcattttatatttattcgcaattttccaaaggctgtcgccttttacgactttatatgtagacgatgatgacttgctgcttgagcttgaacctgaggatgatttaccgttaatcgaaagcgtctgaccgatgtaaatgatatccgattttaatttgttctcagatttaatggaattaattgacgttccgtaccgatttgaaagtccccataatgtatcgcctttttttaccttaatcgtttgcgcagatgccgcgcccgcaaacaaagtcgtccccaaaaccactgccgttgttgctgtaacaagttgctttttcatattttcctccctgaatgattctatctattttatgtgtctcttttttaaagtttttatctgtttcctattataaggttcaatttccactagaaatagacttgacttcccgtgacaaatttcttactaattcgttttagaaaaaagtttttaagggtattaaatatttcaatttgatttcaaacgtgacgaaaaacgagtcaatttgtcatgtttttttcctgtgatcctcgtattttggaaaaacaaagcagtttattttccaaataaccccttgttaaaaaaatcctcgactttttcaaaaaagtgaatggttttcactctttcttgaaaacataactttacaccggaatttacatttctaacaatgtttcacctgaaatttacaggagaaacaggcgctctttacaaacaccccctaccattagacatgcagacacgattaaaggaggacgagtgagaatgagtctatttaaacaggttcgatcaaaacttctgccggcggcagccgtatccgtgctgacagccggtctgattgcgggcgcggggcttcagcactccgaacaggctgcggcaaaaaaacagcctgacaaaaacgaaatcagaaacgtcatcttcatggtcggcgacggaatgggcgctccctatatgaacgcctaccgttcggtcattaacaaaggaaagccttcggatggtatgaaactgacggcattcgatcccaatctcaccggtatgatgatgacttatcctgacgaccctgattccaatattaccgattccgcggcggcaggcacggcaatggccacgggtgtgaaaacgtataacgcggcgatcggagtcgataaaaaaggaaagcgggtaaaatccgtcctcgaagaagcgaaacaaagagggaaatccaccggacttgtcgcaacttcggagattgcccacgccacccctgcggcattcggagcccataataaatcccgaaagaacatggatgacatcgcaagcagctactttgatgaccgtatcaacggaaaacagaaagtcgatgtgctcctcggaggcggcaagtcaaactttatccgtaaagaccgcaatgtaacaaaggatttcaaaaaagcgggatacagctacgtgacatcaaaacaggagctcaaaaaggatcgtaacaagaagattctcggcctgtttgccgatggcggactcgacaaagcaatcgaccgctcaaacgccgtcccttcattagaagacatgacaacggcggcgatcgacaggctgaacaagaataaaaaagggtttttcttaatggtcgaaggcagccaaattgactgggcgggacatgacaatgatatagtcggcgcaatgagcgaaatgaaggattttgaaaaagcgtataaagcagcgatcgcatttgccaaaaaggacaaacatacgcttgtcgttgccacggctgatcataccaccggcggattgacgatcggcgcgaatgacgataaaaactggcatgttgaaccgattcttgccgcaaaaaaaaccccggcatttatggctgaccaaatcaaagcgggcaaatccgtatcttccgtgcttgcgcgctatacagacctgaaatggtcaaaagctgaaatcaaacagatcgaaacggccgcaaaacagaatgctgacaagagcatctacaaagcaatcattaagctctttaatgcgaaaaccaacagcggctggacaaccggcgatcatacaggcgaagaagttcccgtttacgcatacggtccgggaagagagtcatttacggggcttttaaacaacacggaccaggccaaaaagatttttcacatcctgagacacggaaaataaaaaaaggatgcgggggtttccccgcatcctttcttcttttacagatatctccggtgcactcctttgccgtcatacgaaaacatcacttctctgtcttcaagaacagattcgatgtgcacgctcctgccccacagctggtacagatacggcagcactttctccaaatatttcagatcaagctcaattccctcataccaatgtttaatataaagctcattattcttcaggtaatccccgtcattgacggtcagataaggaaatcccccgttgacccgcatgttcacgagctgatcgcgcacggccttccattctttgtcgatcactttatagtccctgccctgcttttggaataaatacaaatcctcacgcatcacgagatctttcgtcaaataattgcggataaatgatatatccgattcaatttccctgacctcaaacattttctcgcgtccggaaccgggctttacccctgtttttttcatttcatctgtcgggttgtcataacgctcttcgatgtcttcaaaaattttcagccctaaataatacgggttgattcccgtttttgacggctgaacgacgcctgcgttcagcttcgcaaattcgatggcttcatctgaagtcaggtcaagctcgcggataatccgctgatgccaataggatgcccagccttcgttcatgattttcgtttccagctgcggccagaaatacagcatttcttctctcatcatggttaaaatgtcacgctgccacggttcaagctcccgcgaatgttcttcgataaacagcagaatatctttttccggccggggcggaaacggttttttcccttttttctttttcacctgcttcggcttatccattccccataaatcatcgtaaggcgatggcgcggtttcttcttcgtcctcctcttcgtcatcgacgctccacagcagcttcggcctgacgagcgacggatcgatatgctcctgaaccgccagaatggcatctaaaaaggactccacctcttttatcccgtgaattctttcataatgcttaatccgctccgccgcagccgccatactctcaaccatgtcccggttcgtattttgaaagcggcagttatgtttgaaaaaatcacaatgggcaagaacatgggctacaattaatttattttggatcagcgaattgctgtccagcaaaaaagcgtagcaagggttggaattaatgacaagttcataaattttgctcaaaccgagatcataatggagtttcatcttgtgaaattgtttgccgaaactccaatggctgaatctcgtcggcatgccgtacgcgccgaatgtataaataatctcagccggacaaatttcatatctcatcgggtagaaatcaaggccgaaacccttcgcaatgtcggttatttcctcaattgcccgctgtaaaccttttgtctcctccgcgttcaaccgaatcccccctacttggacttatttataatgtatgacccctcctctcaaaagatgaaataacagaccggtttccgtctgaaaactttcggcacatccgccccgtttgctttatatgtaagtgggtaaaacacacaccatactccaaaaagaaaaggagcgattctacttgaatacagcagacatgcttacgacgtatctcagcaaactcccgaatctgatcatcgcactgctcgtcctgcttatcggctggggcattgccaaaatcattgaaaaagccgtatacaaaggcctgcaaaaaacaaaaatcgacgacaggctgttcgccgaaaaaaagccggcgcgctattcctcagaaaaagtcatcagtaaagtcatttattttatcgcattaatcatcgtttttattctattctttaacattctgcatctgacaaccgtggcttcgccttttgtcagcatgctgtcagcgataacggcggctgtgccgagcattttaaaagccggcctgattctgctgttgggctgggcagccgcttcgcttttcagctatctcgtcaaaaaagcgggcatgaaactcgctgaaaacggccggttcagaaaatggacaatggtgtctgaagaagcggagatgagcagatccgttacggccgcttcacgaatcgttttttacttcgtcttgctcttgttcctgcccggcgtcttggccgctctccaaatcagcggagtatcagggccgtttacaaatatgatccaaagcgttttgtcctttataccgaaattattcgccgcggcgctgattgttttaatcggctggcttgttgcccgtctcgtccgtgatatcgtcacaaactttctggcgagtatcggcacggaaaggctcgccgcacgtatggggctttctatatacctgaaggatacaagcctgtcggcaatcatcggaacgattgtctacgtgctgattttcattccggtgatcatttctgcgcttgaccggcttgatgtggcgggtatttctgaaccggcgtcagccatgctgcacacggtcttcacaatgctccctaatatcattatcggtatcgtgctgatcatcgccggcatctggatcggaaaatgggtcaacagcattgtatccgggctcttgcaccgggccggtttcgactctcttctcggtaaaatgggctttgaacagacgggtaccccgaagctgacgctttctcagacggtcggcatgattgttcagattatcatcgtcctgctgtttacggcagaggcgctgcagcttgttcatctcgaatttctcgtcgttatcgcaacaggtattatcgcttacctgcctaatgttctggccgctgtatttattctcggaatcggacttttggccggacagctcgtcagcagactgcttgccggtatgctgagcggaaaggaattcagattcctggcgccgcttgcgaaatataccattatcactctttcaatctttatggcgctggatcagctcggtgtcgccgacacgatcgtaaatgccgcgtttattctgattctgggcggtttcgcgcttgccttcggactttcattcggtcttggcggaaaagatttcgcctcccgttatctcgcaaaattggatcgcaaaattgaaaaacatcaatcggctgacgatcggaagccgccgatgtcttaacgaaaaaaacgtgcgctcagaaggagcgcacgttttttttttgagttaagggggcaaattccttttttttcattttagattcatatatgatagactgtaacagaagcaaaatctcttttttcgaggtcattctatgaaattaacgaactataccgattattctttacgcgttttgatttttttggcttccagacattccgacgaactttccaacataaaagaaatcgcagatacttattccatctctaaaaaccacctcatgaaagtcatttaccgcctcggccagctcgggtatgtcgaaacgatccggggccgaggaggcggaatccgtttaggaatgacaccggaagacataaacattggagaagtcgttcgaaatacagaagacgactttaacatcgtagaatgctttgactcccaaaaaaatctctgtatcatatctcccgcctgcaacttaaagaaccttctgaatgaagccctgcaagcttacctggccgttttagacaaatatacgttaagggatctggtcaaaaacaaagaggagattatgagactgctcagaagctgaaggaatgtccgcattccttcttttttttatgccggcataagaaaaaaggactatttctattaatatgataaacgattgcagacaagtgccgatataaagattatcattactgatatcctcaccttgcggctgcaacgaatggggatagtaaaatcatcgcaggaaaagggagattcattatgagaaaaaaggtagcggtcggtttgactgcatctgcgatcgtcgggtctgcgttagctgtaacaccggcagaagcacaaacgattaaggttaaaagcggagattcattatggaagcttgcccaaaactacaatacgagcgtggatgccattacatcagccaatcatctaaaatccaccgttctttctatcgggcagacgctcaacattcctaacggcaaatcagatgccggcagcaaaaatccatcttcaaagaacagcggcacgactaaaagcgtttatacagtgaaaagcggcgactcgctgtggctgatcgcatctgattttaaaatgtccgtacaggaactgaaaaaattgaacggtctgacaagcgacttaatccgcgcgggacagaagctgcaagtgacggggaaagtttcctcaagcaccgatcagaaaaaaaccacgccgggcagcagctcaaacagcagcaaaaagcagtcatcatcttccgggacgtataaagtcaaactcggcgattcactatggaagatcgcaaacagcgtcaatatgaccattgcggaactcaaagtattaaacaacttaaaaacggatacgatctacgtaaaccaagtcctgaaaacaaaaggaacgtcttcttcgggaaacacgccgtcaaaggacaattcaaaccaaaataaaaaccagacgcaaacgtcctcctatacagtaaaaagcggagactcactctggaaaatcgcaaacgcatacaatatgacggttcagcaaatcagaagcatcaacaaactgacgtcagacatgctgcgggtcggacaagtgcttaagctgaccaaaacgtcatcttccggctcttcgacttcaccgtcaactccgaaccagtccggaaatacagggaaaaccactacatataccgtgaaaagcggggattctttatgggtgatcgcccaaaagttcaatgtgaccgcccagcagatccgcgagaaaaacaatctgaaaacagatgttcttcaaatcggacaaaagctgacgattaccgggcagcagacaaacacgactccgaatcagtccggcaacacaggcggcacaggttcaacaagcgcgaagattaatgtaatgatcgatgccgcaaaagctcagctgggcgtaccgtatgtatggggcgggacgacgccgagaggctttgactgcagcggtttcatttattacgttctcaataaggtcacttctgtatccagactttcagccgcaggctactggaatacgatgacatcagtcagccagccggcggtcggtgactttgtctttttctcaacttataaagccggaccttcccacgtcggtatttatctcgggaacggccagtttattaatgccaacgattcgggtgtcgttatttccagcatgaacaattcctattggaaacagcgttacctcggcgcaaaacgtttcttctgatatctgacaagctgtacggcctcaataaggctgtgcagctttttttacagtctgaaaatattaatgctgatcacgtgttttgttacgggatggaaatacacttcagcacgggatgaaaacgtttcttttgctgtttgcaccgttacgcgaaacacatctttcgtctgttcccggttcacttttgtacggcccatgtacgaataatcggtaagctcggcccccttgtattcacgttcaagctggttccatgcgagctgctcccatttttcaactgacggatcaaggtgttctgtatgccctttttcagcgatcgaggcaatgagaatgccgcaaaacaagagggcaagcacaaatggaagggatttcatctttatgttctcctgagtcgttttttgtcaatcttagcgtgtccaaagaagagacggatatgcggttttattttatgtctccctcatattgctatgccgctgtgataaggccaccaacttttcccccgttgcatcgggcttcgacggcataaactaacggagaacttctcattgaaaggagaagcgttagatggatcatgccgattatgacaaagccttgtattacacacaccggtctcaatgggacaatttgttaatattgatggttcgtacaaaagatgatttattatcaaagcgtattgagcactttctgcacgcgtatcatttcgaatatgatcatgcggtgcttgaaaaagagctgtattctcttctcgggtatattgatcatgcgacagagctcgcttatgaagatcaattagccatgctgacataaaaacaatcccggcgtcagacgccgggatttcttatgtttgtgaacatattcagctcttcgatcatctctttcaggctgacagccatatcctcagatacggtccggcgctccatgtcgatgtgaatcgggtctaagaccagctgtttcgggatgacatttgcatagacgccccgcatgaccgtccgcatattcgccagcgcgttcatgcctccttttcctccgcccgccgcggccatgattgccaccggtttgtatgcccagtgatcgctgcttaaaaaatcaatggcgttttttaaagcgccgctcatgccgctgtgatactcgggagataataagacgacggccgccgactttttcacctgccgccttaactcttgcactgaaggcagctcgttctgttcttcttcaccgttataaagcggtagatcactttcgctcaaatcaataaaatcggtatgaaaccgatctcttatataagaagcggcaattctagtccgcccgttttttctcggtgtgccgctgatcactaatatgctcatgattttaccgcctttccaaaaacattatattttaccgcatacaatgccgcctgcgtccgatcggaaagattcagctttgacagcaggttggacacgtgggttttcactgttttttctgaaataaacagtgccgccgcaatttccttattgcttttccctttggctatttcttgaagaacatctttttcacgtggggtgagctgatcatatttttccttatcctgatcatcctgaaccatatgggtcagcacgtgaggcacaatatccgccgacagccggtaacgtccggaatacacttcccagagcgttttcactaaatcatcgggctgggcgtctttcagctgatacgcttttgcgccggctttaagggcgggaatgacatgctcctgatcagaatagctcgtcaaaacgacgatactgatgtccggaaatcgttcagccacaatttttgccgcttctatgccgtccatatcaggcattgataaatccatcagaatgatgtccggctccgtcttttcagcttgctgaagcgcttcagcaccggtggacgcctcaccgacaacttcaatgtcttcctgagtggcgaagaaatagcgcagtcctttgcggacaacgtgatgatcatcagcaatcacaattttcatcaatcagacctcctgtcccgaaacggaagccgaacggagacaatcgttccggcgccaagctcggattgcaatgtaaagcggcctccgattgcttcggcgcgcgctttcatgccggtcacgccgagcgacggcagccccgtatgcgtatctgcgctgaagcccgctccacggtcgctaatatgaagctccgcgcaatccgactttttaacggcggaaatgataacccggtccgttcccgcatgctttttacagttattcaaggcttcctgggcgatccgccaaagcgcgtgttcctgttcatccgtaagctccagctcatcctccatttcacaaacggcttccaggccgataagagcggcatagcttttgatcgacgcatacagccctttcgtcaaactttccggcttcagctgccaaataagcgccctcatttctgttagcgcatcctgagacagctcttgaataaacgtaatcatctgccggagccgatcatcatctgtaaagctctttgcggcttttgccgttaagctgacagaaaacagcatctgattgacggaatcatgcagctcttgcgcaagtctgcttcgttccatcaacagggcgttctgctgctcaaattcggccaatttcatccgctgaatcgccgttccgatttgaaatgcaaccgcttcaagcagatgcagttcttcttcgttgaaaaatgtcttttcgcttgcggcgacgtttaataaaccgaacttccggccgccgtcctcaagcggtacggtcgcatgatgggtaatgccctccgtatcgcggcagttcgtcgtctgttccgcaaattcaatccgtttacaattcattatgtttacggcctttgtcaatccgccattgctgaatttggtcagacaatagcattccccgctgcacatgagtgcattttcccgctgaccgagagccggcggtaaataagcggatgcggcgagcgtataagatccgtccggctcaatcagaaaaatccaccctgtctgcagcccggtcaggctgagcagttcgcgaagcactttatcaagcgcttcctttaaatcgtggctttggtttaaggtttccgcaatcgcttttaacgtttttaacgtttctaccgtcgttttcgtcaatttccctcactccggccaatcagaattatccatattatatcaattcttttctgtatattcctttgttttcagcatgaattttcctcatactttcggatgaggcgtataaaaaaaccgccggatgtcgcttccggcggtttgttgtttatttcgttttttccactatgccatccaccgttttcatgacagcttcagataatgcggcaagacgctgttcgctgtcttgtaaagaagttcccttcacggcgaaatagaacttcactttcggctccgttccggatggacgaaggcagaaccaagagccgtcttcaaggaaatatttcaggacatttgacttcggcagatcaatatcttcttcatgatgatcggcaaatacagtccgttttcccgttgaatagtcttcagcctgcgtgatttgttttccggccatctgcttcggcggatcgtttcggaaggaagtcaggatagcggaaatctgctctgctccctgttttccttttaacgtcaatgacttcaagccttcacggtaataaccgtattctttaaaaatggacagcagcgcgtcataaagcgacatgccctgctttttataaaaggcgcatacctcgacggctaacagcgcagcctggatcgcgtctttgtcacgcgcgaaatcgccgattaagtagccgtagctttcttcatacccgaactggaacgtgtattggcctgatttttcatattctttgatcttttcaccgataaatttgaagcctgtcagtgtgtcaaccgtatctaatccgaacgatgaagcgacggcgcggcccaattcgctcgtgacaatcgttttcatgacgacaccgttttcaggaagggcgccctgttttttcttctcggaaagcaggtaatgcaataaaagcgcgcctgtctggtttcccgtcagcactgtgtacttgccttcgctgttttttaccgcaatgccgagacggtcggcatccgggtccgtagcgacgagaatatcagcgttttgttcttctccgagtttaatggcatattcgaatgccgcgtgctcttccggattcggcgatttgacggttgaaaaatccgggtccggcagctcttgctccttcacgacggtgacgtttttgtaaccgagtgcttcaagaccgcggcgcaccggtttatttgccgtgccgtgcagcggagtgaacacgacgctgacatccacttcatccgaaagctcgggatgtacggagatggaagtcagttcttcagtatatggtttatcaatttcttcaccgattattttaatcaaacctttttctttcagcgactgttcatcttcaacttgaatcgttaattcattttctatggcattcacttccgcaatgacgatgtccgcttctttcggcggcagctgtgcgccgtcatcgccatacactttatatccgttatattcaggcgggttatggctggccgtcacgacgataccggcataagcgttcagctttctcaccgcaaaagacagctcaggcgtcgggcggagctcatcaaatacgtatgtttgaatgccttgggaagcaagggtttttgcagcctccatcgcaaactcaggagatttatgacgggagtcgtatgcgatcgcaacccctctttttttcgcgtcttccccctgtttcgcgatatacgccgcaagtccggcggatgctttgcggaccgtgtaaatattcatcctgttcgtacccggcccgatttctcctctcatgcctcctgttccgaactcaagatttttgtagaaaaaatcttccagcagctgctcgtttccttctgcgtccgccaataattttttcaattctgaatctaattgttcggcctgattccagcgttcgtaactcttactccaactcatgttcgtcctcctataatttcagcttatgaccatattttaatatgaagcggctgcccgtgtcacttgataacttaaccaaatgctttatgtaaaaagataaaagaagggctcatgccttttcggcacagccctccggttattattgttcgagcggaacaaccgcgtcgtgcagcagcgtatttaaccactcagtgtgtttttctttcgtttcgtcattccattggaatcggtcgctcatgtaatcaatcacggctgttttatacgtttgcacccatttgatgtcgaagaacagtcttcccgttctgcggacgaagaaatcggcaggtgtcgcagccatttcttcttcgatgctgtaagccgcttccgccagaatgtgaaccggaatctggcgtttttccgcttcgtctttcagaccttcaatccggctgaatacattttcaacgttagagccgtatctgatggctaactgcttagcggtttcctgtgataaaccgattttcaagccgtcttttgtctttgcttccacaaatgactcgaagtttttagagccgccgacatgtccgccggaaatcggcatcgtcttcgtcttgcagccgccgaagtcctggccgccctcttctttcaagcggtcgcggacaagatcgacaatgtgctcagccattttacggtagcccgtcagttttcctccggcgatcgtaatcaggcctgattgagatgtccagatttcatctttacgggagatctcagacgggtctttcccttcttcgtgaataagcggtctgaggccggcccagcttgattcaatatcgtccgccgtaatgttcagttccgggaacatataattgatggagctgacgacataatcgcgatcctgcaccgtcatccgcgggtgctcaagtttttgtttgtaaaccgtatcggtcgtacccacgtatgtttttccttcacgcggaatggcgaacaccatccggccgtccggcgtatcaaagtacaccgcctgtttaagcgggaatacggattggtcgaatacgagatggaccccttttgtgtgctgaagatgttttccgcttttgctgtggtctttttctctcagctcgtcgacccacggacctgtcgcattgacgatttttttggcgtaaactttgtattccttgcctgacagcagatcttcaattaaaacgccgacaacttttcctttttcataaagcagttctttcactttagaatagttgacaggctccgcaccgaatttaacggcttctttcatgacttcaatcgtcagtctcgcatcgtccgtccggtactctacataatagcctccgccttttaagccgtcttttttgacgagcggctctttttgcagcgtttctttagcagacagcatgcttctgcgctctgatttttttactcccgctaaatagtcatacacacgcaggccgatggaagtagagaatgaaccgaacgtgccgcctttatgaaacggcagcagcatccattccggcgtcgtgacgtgcgggccgttttcgtacacgatggcacgttccttaccgacttctgcaaccattttgacttcaaattgcttcagataacgcaaaccgccgtggacaagctttgtggatcggcttgatgtgccggccgcaaaatcctgcatttcgctcaaagcgactttcattccccttgaagcagcgtcaagcgccgtaccggcacccgtaatacctccgcctataataaacagatcgtatgtttttttagtcatgtcttccagcatatgatcccgttccaaacttgaaaattggtgattcatcattacgtttcctccttgttgtcacggtatagaaaaagagaccacaacagccaaagcgcatgtcatcactttggtgctgtggtctctcctcatctcaggaccgttcctattaacttgttttcagtataccacatttttatcttatttaaaagccatagctgcatttactgcttttttccatccgccgtacaattcatcgcgtttttcatcttccatttccggtttgaattgcttatcaaggttccattgatcagcgatttcagtgctgtccttccagtagccgacagcgattccggccaaatacgcagcaccgagcgccgtcgtttcattaatttccggacgttcgaccggcacatcaagcaagtcgctttggaactgcatgaggaagttattttttaccgctccgccgtctacacgcaatgtttttaaagagatgcctgaatcagcctccatggcatcaagcacatctttcgcctgataagcgagagattcaagcgtagcccggataaaatgctccttcgtcgttccgcgtgtcaggccgaaaactgagccgcgcacgtcactgtcccagtacggtgtgcctaatccgacgaaagcgggcacgacataaacaccgtcagcggaatccacacgctctgcgtatgtctcgctttcttttgaatcttggaacatccgcatgccgtctctcagccattggatggcagaacctgcgacaaagatgcttccttccagtgcatactcgacttttccgtctaatccccaggcgattgtcgtcagaaggccgtgatcagaagtgatggctttttctccggtattcatcagcataaagcagcctgtgccgtatgtgtttttccccatgccttcttcaaagcacgcctgaccgaacagcgcagactgctggtctccggccgctcccgcaatcggaatgtttttaccgaagaaatgataatcaaccgttttcgcgtacacatgagaagacggtttcacttccggcagcattgatttcggcacgcctaaaatatcaagcagctcgtcatcccattttaattcatgtatattaaacatcagcgttcttgaagcgttggaataatccgttacgtgcgccgcccctccggacattttccagatgagccatgaatcaatcgttccgaacagaagacttccgttttccgctttttcccgcgcgccttctacattgtcaagaatccatttgactttcgttcctgagaaataagggtcaatcaaaagtcccgttttttctctgaatgtatcattatatcctttttcacgaagctcttcgcaaatgccggatgtttgtctcgattgccacacaatcgcattgtataccggctttccggtatctttatcccatacgaccgtcgtttccctttggttcgtgatgccgatgccggcaatttgatcagcgctgattccggactcggagatcacagtcgcgataacggcgagcaccgatccccagatttcgttcgcattgtgctccacccagcccggctgagggaaatgctgtgtgaattccttttgagcggaatgcacgatttttccttctttattaaaaagaatcgctcttgaacttgttgtgccttggtcaattgataaaatataggtctccatgatgccgctctcctttttaaatatattcagaatttgataatgttttccgtgattgagatttcttggtataaagataaagtatgaaaagcacgataaccattataacgcttacaaaccaaaagctaggtgtcacatttcctttaaacgcggcattgtaaaatacgccgccgaacgcaccgcccatgatcggaccgactacgggaatccaggcatatttccaatttgacggcccttttttcggaatcggcaaaaaggcgtgagcgattctcggccccaaatcccgcgcagggttgatcgcatatccggtcgtccctccaagagaaatcccgatggcaacgatgaggaatccgacaatcagcgggttcagcccttttgtaaattcattcgctccgattgccaaaatgccgagcacaagcacaaacgtaccaatgacttcacttatcatattcccaaatgtatgaggaatactcgggccggtcgagaaaacgcccagtttagcggccggatcatccgtcgccttccaatgcggcagataatgaaggtacacaacaaccgcaccgatcattgctccgatcatctgtcctgcaatataaacagggacctctttccaaggaaagctgccttcaagcgcaaggcctatcgttaaagccggattcaagtgggcgccgctgatgctgccgacggcatatgccgccatggctactcccaatccccagccgaatacaataacaatccatccggattggtatgaaagcgatttctttaaattgactcccgcacaaacgccgccgccgaaaataacaagcagcattgtaccgattacttctccccaaaatgctgtcatcatcattcctcctaaatgacataatagcaggtttgacagagttatagagaataaaaaacccacaacaaaccgctttacgctttattgcttccgtaaagagctgttgtgggtctccgggtctccatcacatagtattaacctaggtctattgtaacaatgggtgtaagcggtgtcaatctttttttgtcatagaatgttcatatttagcccataggtcggtgtctgaagtcgtcacggccgtggctcctgcctgcaaggcgttttcaacgtcctgctccgtgcggatgaagccgccggcaaaaatcggaatccccgtcatttctttaatttctctgattaaagtcggaacgatgcccgggagaacctcgataaagtcaggcttatgctttccgacgaattccatgcttttctccatggcgctcgtatccaagagaaacagacgctggatcgcgtatattttcttttgtttcgctttgacgatgactgatgatctcgtcgaaatgatgcccgcgggccggatatcctggcaaatgaactccgcaccgtattcatcatgcttaatgccgtggattaaatcgacgtgaaccatcagaagttttccgtgttttttcgcttcattcacgacaccttttaattgaccgaggtggatatctaaaatgacgccgtataagaacggactttctaaaaatgcatcgaattgcttcatgttccggattgccggtagaatctgctggttgtgaaaactcatgttttactcctttacattaaaaatcaatgctcagcacgctttccttgacggtcgaaatgatgaaagagagctcctcgtccgacaggcaaaaaggcggagacagctgaatgacattattatatcccgctacagtatcgccatttttcccgacaagcaggcctttttctctgcacgcggtgatgacgtgctgcacaagggcggcatcagcgggttccttcgtgattttgtccttgacgagctcaatgccggcaagaaggcccttgccccgtacatctccgaccgccggatgttctctgagcggctcaagctcacggagcagcctttctccaagctcccgggagcgggcgatcagattttcgtcctccatcaattgcaggtttttcaaggccagggcgcaggctgccggattgcctccgaatgtattcacgtgccggaagcggccgtacggctcaccgcccgaatacgcctcaaaaatctcccgttttactgccgttgccgacagcggcagataagcgctcgtaatgccttttgccattgtgacgatgtccggtgaaacgccgtaatgctgaaatccgaacggctctcccgtgcggccgaaaccgcaaataacttcatcactgatcagaagcgcgccgtggcggcggcaaatgtcctctacctttgccatatacccgtccgggggcatcagtatccctccgcctgtaataatcggttccataataacgccggcaatcgtttcgcttaactcccacgtcatgatccggtcgatttcatgcgcgctttccaatgtgacggcatcgccgggattccgatagagatcaggcggcgccgcgtgcaaaaaaccttgtgagagcggctcatatttatattttctctgcgcctggccggtagcggcgagcgcccccatcgtattgccgtgatagcctctgtaccgggagatgaatttgaagcggctgtgatcgccgttttcaatgtggtattggcgggcaattttgaacgcggtttcatttgcttccgatccgctgttggaaaagaagattacataatcgccgccgagccattcattcaatttttccgcaagctcaatcgcgggttgatggctttgggtcagcggataataaggaagctccttcaattggctgtaagccgcatcggcaagttcctttctgccgtatccgatattgacgcaccacaggcctgacatgccgtccaaataccgtctgccgtcaatgtccgtaacccaggcgccttcccctttttggacgattatgctgtcatccggctccgcccctttcatcgcgtgccaaatcagctctttatccttttgtttgagtgactgatttttttgtacatgttccacaccgctcatctccctttcaatatcattgcactgtatcgaaagctgcccggcttctgacgccgattctcttggtgaagttttcctcttaataagaatataaaggcgcggcatgggcgagtcaataaagcggcggcaattaaaaaaacgctttctcccagaaagcgaaagggctacaagagcatatcccgaaaccggggccggtgcaagtgtttttataaaaaaacccgccccttagggactgccccccgtttttgagacaggggtcaaaacaccttttaaacagccaattgccgatagtttatcggtgattggttgtttagtttggtttgaatacgaatattgttataataatgaatgtattctatgacagtgcgttctacgatggcagtcgtagttcgatcaatgctgttaagatagaacgtttcagactttagcgaggaatgaaacgattcgatggaggcattatcagcgggcgtccctttgcgggacatgctcatggtaatgccttttgttttaacagctttttgatactcgtaagatgtatacacagaaccttggtcactatgtaacacgcagttctcaggcagcattggtagctgatcaagtgtgtctaagacaaaggctgtgtcctgcttatccccaatagtaaaagcaatcacttctccattgtataaatctaatatactggaaaggtacaattgtttctgtccataaggcaaatatgtgatgtccgttactagtttttcaagaggacgatcagactgaaagttccgatccaatatattatcgaccacggcatatggctgcccatccttcttgcgctttttcaccttaacccgacactgccattgatttttctgcataatacgttgaaccgttttatggttaatacacattctcttttttagtatggctgtgatttttcgatatccatatcgatacttgtgctctcggcacaacgtgccgatttgtttttccaaatggcgcttgggatgatccttcatcagattcttcttccaacgataataagacgctcgagagatacctaaatgaatacagatatcctgtacggtcattgtgctgtgcaatatttctacaagttcgactgacgtttcgctatcaacttcctttccaattcgttgtacttttttaaaacttcattctgttgtctcaggtaacgaatctctgcctgcagtttctctaaatcggaagaatactccggaccttttccgtaagtgtattgctttccaacaggctgttcgaatcgatgtgtatcaccagccttataccatctaacccatgtctgaacctgtgtcttattcttaatattcaactcctgcaggatctctttcataggtacgcctgccaatctcatttctacagccttctgtttcacttcaaccggataactcactcttgtccccatagaaaaaacacctccaagtctaatttcggataacaatcatccgtattcaaacttgaaggtgtttttatttgtctcatcttatggggtcagtccccttaagcggagcgggcgttttttttatttcagatgcgtaatccggtaaatgtctttgcgccggtctttcagctggcgcacggttccgttttcacgctgccttcttaagatttcaaggtccacgtccccgatcacgaccatttcgatattcggattcgtttcaccgacgattccgtctctggcaaattcaaaatcagacggagcaaaaatggctgactgcgcgtattgaatatccatattttctgtttgcggcaggtttccgaccgtacctgagatgacggtgtaaatttggttttcaaccgctcgcgcctgagagcagtaccttacgcgcaagtagccttggcggtcttcagtgcagaacggcgtaaagataattttcgccccttgatccgcggcaattctcgcaagctccggaaattcgatatcgtaacagatctgaatggcgatctttccgcagtccgtatcaaatacgcgcaccctgtctccggcgctgatgccccaccatttccgctcattcggcgtaatgtgaagcttatattgtttttcaatcgtgccgtcacgtctgaataagtacgcgatgttataaattttcccctcttcttcaacgaagtgggagccgccgatgatgttgacgttatatttcaccgcgagatctgtaaagaggctgatatagtcctcggtatattcggtaatcctctgaatggccagactcggagaacgctcctcgaggaaagacatgagctgcgtcgtgaaaatctccgggaacactgcgaaatcagatctcgcatcggaagccacatcgacataatattcaacctgattggcaaattcctcgaaggagtaaatctttttcatttcatattgaatgacgcagatgcgcaccggaaatgccgatttgtaatagcgcttcgattgcggcaggtaatcgacattgttccattgcattaatgtcgcatatttaatggacgcggtgtcatccgggagataattcggattgatccgcatgagcgtaaatccgttcatcagctggaaagaaagcaccggatcataaatctgatggcgcgtcacctgttcgacataagctctcgccgtcatttcttccgcatacttatgataattcggaatccgcccgccgataatgatgcttttcagattcaatcgtctcgccaagtcttttctcgcctcatacagccggtgtccgattttcatccgtctgtattccgggtgaaccattacctcaatcccgtacagattcaatccgtccgggttgtggttcgtgatataaccgtcgtctgtaatgtcctgccacgtgtggcggtcatcatattcatcgaaattgatgatcaggcttgagcatgaaccgataatttccccttcatactcggcgcaaaactgaccttccggaaagtgcgcgagatggctgattaaatgctcaggctcccacggctccatccccggaaaacaatccttttgcagctcaataattttgttgatatctttctcttccatattccggatgaccattttcttttcaaaacgggtcagatcaagtttctcagacaatgctgcttccccctgccgtttcgttttgatcgttcaatcgctgtaagagtaattcaagttccatttccgccatcgattccagtctgtgatcgtattcttcaaataacagggcgcttgttaccttattcgggacgatgacacatttcatgccggcccgtttggctgcgattgagccgttgaccgaatcctcaaaggccagacattcagatggttcaacgcctaaatgttccgcagctttcagatagagctccggattcggcttcacttcttctacgtcgtcagccgtctgaatcacttcaaattcatcaaacaggcctaattccttcagatggcccgatacccatttaaaatctgagctggacgcgagccccactttcaatcctaattcttttgccgcggctaaataagcctccaccccgggacgcgccgtttccgtcttcatccgctgttcgaagcgcccgcgcctgatcgccgtcagttcatcatgatcgagctttcttcccagctgctcctctaaatatgcgaacggcttaaaccccgcggccgttccgatcacctttccccagacggataaaggcaatgttgaaccgtgttcttcaaacatttcctgcagcacttcatattcatgggtttctgtatctaaaattaacccgtcaaaatcaaagattaatgcttttatcaatggttacagctcctttagctaaacgtactgacctatgtatacactataccgtgaatttctttcgcgttcaaaatgtaacattctcacggaaagaagagcctgcatgagtgcaagctctcttcatccgttactgtgtgttttgactggaaatattggaaagagctgctcccgcagactcatttgaacgctgatcgaccgctaagtctccaagcgcaacgatcccgaccagatgattttgatcgacaatgggaaggcggcggatttggtgttgggccatcagatgtgacgcctcttcaagactcatttccgggtttccggatacaactgcagaagacatcacgtgtgaaacaggtgtttggccgtcgcggccttgagccgttgttctcaatgcgatatcacggtctgtcagcattccttttaattcccctccgtcaacgacgggaattgctccgacattatgctggtgcatcagcgcagccgcttcctgaatcgtttgattgggagaaacggtagccacgtgggtagtcattgattgtttgattgaactcattgtaaagcacccctttcgacatttattatgctcggggatttgtctcattataaagggagttagaggaaagaaattgtggtatcatgtcaaggaagcaaaaaagagcctgttaaaaggctctttatacccgtcagatcagccttctgtgaccgcaggcatctgatccggcccctgtctcgaaatcatcataggtaaagggaaaattcattccgcattcattcagcaaagcgcaatttttatcaaacagcgcccgctctttgacgtcatataccgggtgcggctttgacagcatgatatgtaccgtttgcagacaagccataatttgaaacgcttcttttaaagttccttggtaacgttggttttgtaatgataatacgcccctttttttaaagcgctgaatttccagttcggagaaataaagaggaaagacattttgaaacaattcagaggaaagctcttgtatcgcgctttcttgtccgtcagtcgctgcgttcacaattctcacatcaatcacctttcttgccatgtgaatatccttaatctttatcaagaatagcatagaaaaaaacgcgaaagctaaggtaagtgtttcctattgaaacagccgctttccgcttgaaaaggagctttatgatatgaaacaaaatgaccgcggtctggaactcctgattacggaaaagcacgccggacaatggctgttttcagtcctgaaatctgaattccaggcgtcaaaacccgtaattacggaatggatgaaccaagaaagcattcaggtgaatcgaacatccccgaaaaacaacatcatactgaaaaacggagatcgcttattcattgatcttcaggaaaaaacgggttcttcggtgactccggaatacggagagccggacattttatttgaggacaatcatatgctgattgcaaataagccggcgggaatgccgactcatccaaatgaagagggtcagaccggcaccctcagcaacctgatcgcttaccattttcaaatcaacggcgagcaggcgaaagtgcgccacgttcaccgtcttgaccgtgacacgtcaggcgcggtcgttttcgcgaaacaccgcctggcccatgcactccttgaccgtcagctcgaaaccaaaacattaaaacgcacctatatcgccgcggcggaaggaaaagtcacgccgaaaaaaggcacggttgactcgccgatcggccgcgacaggtcacattccgtcagacggcgcgtctcatccggcggacaagccgccgtcacccattacaaagtgaaaggctatcatcccggtgcgcagcttacattggcagagcttgaactggaaaccgggagaacacatcaaatcagggtgcatatggcaagcatcggccatccgttggcgggcgatgacctgtacggcggaagcaggacgctgtttcacaggcaggcgcttcacgcaaaaaaagtcagtgtcgtccatccgatctcaggagaagaaatcgttgccgaggcgccgatgccggctgatctggctcattttaccgaaacgtatttttcttaaacagggtcggcatatataatatatcgtttcggcgcatttccaatgtaagaaaacggatagcaagtggtcaggatcagttcctcccgcttgtgctgaagggtgatgacagatgtatcatcccggctgacgatttttgtacggctgattttataagaaaacgtgccgtaagacaaaatcacgttcagtctgtctccttttttcagttcgccggtccggcggaacaccgtgtccctgtggccggataacacaatttggccgtgatcgcccggataatagctgtccttataatgtccgacgccttttgctaaatcatctgcgtcagtcccttccacgatcgggagctcagcgtcgatttcagggatttctaaaatgccgcttgcctcacccgtttcggggtgaaattcttttttgcgctgtgtcagcacagcgctttttgtttcgttcttttccaagacaggttctgttgctttttttgcttcttcaagcgaatggttcgttttcatatgtgaatcaatgatcttccagcttccgtaacatgtgatgatgataccggcgatgatgacgaaaagcggaataagtttcagtttgttcatcgtgtgcgggttccccttttctttctgaaaagccaatatacgccggcacccgtgatcaccagaccggccaatgccgtctgatggctgcccgctgaagtatcaggcaatgggcggcctttttgtgtgccgctttcagtctgttttgtgctttgttccgaatttgcggcagacgccggacgggattcgggaattgactccactgtatcagatgctgtttcttttacgacaggacgttcaggttttttggtttgatcaggctgttctgctgcatccggtttttccgcttgaggtttttctcctttatcaggcctggtaccgcccggtgtttccccgcttcccggctgattgccggtgtcatcaggtgtttcggcggctgatgccgtgcggatgcggccgtcggtttgataagaaatcggtgcggaaaagcttttgacatagtctactgtcgcttccaaatcctcaggccccgtcaccggattcttgccgagtttcccgatcggaccgtattttgcccccgctgccgttgccataaattgattgactgttactgtatatcctttttcgggctgtatgtctgtcccgtccgccatcttcatatcaaccgcttgtccggtttccgggttccatgtataggaaaatccgctgatgctgtaatccggaccgtacaccggagaaatttgcgcgttaatgatctcccgcaaatcttttcctttgatttcaagcttcgtcagcacattgccgaacggctgtacattataaaggtctccccatgtaatcggccctttttttatgccgtcccggatgcctcccccattcataagcgcaaaatcggatttcatcttctctttcataccgtcggcaatcagatttccgagcgccgtgtcgccgtcatttgaatacccgcccgttatatcatgagccgcttccccgaccgcttcgctgataatcggtttcactttctcttcatatttgcttaatatgcctgccgcagccgggtcaggcttgattttactttgatcgatatattggatttccgctgattttttcacgatatccttcgactctttatcaagttcaagatcggcgattccgattgcttttccgtattcaaatgcctgcacgatcagcttgccgtcgatttctccgtttacgactttatgattgtgcgcggcgaaaatcacatcaatctctgagtctgttccgcttgcaagctttgcggattctcccgtgatggctgagccattttgttcagcagacatatgggcgagcacggcgattgctttaattccttttttcttcaggtcagcggcggcgtcattgacggcctttacctcatccgtaaacgtaatatttttaattccgtccgggatgaccatgcctgccgccgatctggttacaaccccgataaatgcgaccggaattccggaaacgtatttaatttcatacggcggcagaaaggactcccctgacttcagtttacagttggcgcagacgagcgggaaattttggccgtcataaccgcttgtccccttaccgtccggatgatctcctccattgatgatccgtttaagctcattcgttccttcatcgaattcgtgattgccgacagttccgacatcaaaaccgatgtcttccatcaattctactgtcggttcatcctgaaaaagggctgacacgggagagctgcccccgatcatatcgcccgcatgcacgacaaaggcgtgttctttctcggctttcgcctttttaatgtacgctgcggcgtagtccatccgcccgaaagtgccatccggtttaccgtctccgttaaggtcaagctcatattgctgatcaatttttccgtgcagatcattcatactgatgattctgagcgggacacggccggagtcttctgtctgctgttctttatacgctttatccattccagcttcattcagtgatcctgcttgtccgattgcttccgcatctttcacgctgaacatcataaaacaaaccgtcagcaaacagcacgtaagacgcatacccctttttttcttcatttatttcccccctgtcttctaagaaatacgttagcttattttcttaaaaatcacatcacttttttgtaaagattgtcttcactggcgcaaaatagtaaataatccccacgtaacgaaacaggtcttgatgtataacggatcggcttttttcacatcttaatgatgatttgacatgaaggaggaaaacaaccaatggaacagcagcagaatcagcagcagccagtaaatcaggggatcccgggttcaccgcaagtgaatcacggaggacatgagcttttcgatatgcatgaagtgctggccggaacagtcggcgttttggatcaatttatgatgctcagacagtttatacaggatcagcagctggccgacatccttgaccgccagtatcaattcattctcggactctataatctgacggcagaatgctttaagaccggccaaaagccttctcaggaaacgtcgacatatatgatgaaggaacagaaccaggccgtctacggtataaaaccgactcagccgaaaaaaccgaatcaatcattaaatgatgtcaaagatctcgggatcagcggccatatgctcggcctgattaaagctcaagcttctctcttgacgatgagctcgcttgaaatgaccaatcccgtcactagaagagtgctctccgcccaaattcagcaatatgtcgaaatggcgtatgaaatcttcttataccaaaacaaacacggttattatcaggttcctcagctcaatgcacaagatatgcagaccatgctgaattcatttgcaccggcccagggacagccgcaaatgcctccgattaaaggacaaatgggacagcagcagcaaaacctccattgattaaaaaacggcgttggaaacctgactctccaacgccgttttctttttttcatatgcttttgtgaaatcatgttcaaatcgtttcaggctttctttcgtagccgcttcaaagcctttttcaaaatcctgtgtttcggcggttttattgataatggttaagataatgccttctccgaatgtgtcggttaagtcctttatcatatagaagctttgcaaatagacatccgtttcatattccatacgcgatttctgccattttcggtcggtcgttaattgatcaaacggcacgacggaaaatgcaatcggatcaatgactacatcataatgcgcgacccactcgctcagcccctcatgaaaccaaagcggaaatacagacgtatccgtccccaattgccgcgttttttgatgaaacgcgtagtgtgtatattcatgtataatcaattgcttatacatgaaaacggccagctcatcttttttcaaaagcttttttttctcttcaggcaaaagccccatcatctgctcctgttctgaataaaaaccgactacatttttcaatcctgaatattgctccatttcagcttcatccgaaaagaaaatgagttcaagcggcgctgcacctttatagccgacaatgatttgattgatacgctttgcgtggtccagcgtaagcttggtcagatccaagagcggcttttcatccgccgtatagtaaatcgctgtatgtttgtaaatttctttattcatgtgttcagtcacttgttccttcgtcggaacagagcggctgttttggcctgacaggacgtacatcatacttactgaaacggctgaactgacagccaatatgacaaggactccgcacaggatcagagtgaatgccgcccgtttccccatgccgtcacgcaaacaagctcccctccccgatcctttcattttcatctcattctttactttatgctcaggagcgctgggtcgtgacggcagataaaataaaaaagccgcagcaaatgcggcttttccattcatttatttattggggtttgggaatacacgctgcaccatttggccgaattcatcaaacagaccggatacaggatgtccgttttggattcgttttccgtagccttgcatgcgttcaacgaagtccgggttcgctgatacatatacagtccggacatgtttatcggctgatttcaccttatcggtaatcttattttttaaatggttggcgatggcgcctttttgcccgtttgtcaaaacaacggcaacatatgcgctgtttccggcaacgatcacagtcgcatttttaacctcttttaaatcagtcaccttgtcggcggctttatcagccactctcaggttacgattgtcattgtgatcgttgttttggttatgacggttcactgtattcatatttgtcgcaccgtcgttaggcgtgttgcggtaatttacattctgggtgcggttgtcatttcgttttccttctccttggttccccatactgcaccctgcggtaatcagcatcggcagaagaagggcagagataactgcttgtttttttatcatgtgaattcctcctttctcactttacgtataggtttttctattcggcgggatttatgcacgccgtttgcattctgagcggtttggataaatatcagaaggaaagggaaaggtaagcgtaatcaattgaatgaggagggatttaacttgttcagaaaaaaaagcggcatcagcccgacagcgctgctgatcggatcatcgattctgattgcagctttatcacccgaaatccgccggaaaatctccggaatggtttcaggcagaatgcagcataaagatggcacacactccatgcagcctgttgacctgattcaacaggcgttcggcggggaatccggcggacagcagcacgcagacaaagcccggcattcacaaaccggctcattgcagcctgccgagctgatcaaacaagctttcggcggggaatccggcggacagcagcacacggacaaagcccggcattcacaaaccggctcattgcagcctgccgagctgatcaaacaggcgttcggcggggaatccggcggacagcagcatgagcagacttcccgcaatcacgccggctcatcccatacggacggacaggcagaccgcagccgcagtaaagaaacttcgccgaagcctcactataccgagccgattcactttgaagaaagcgcggtaaatgttttaaatgacagcaccgtgatgaatatgctggaagaaattgaacccggaaatcattagaaacgaaaaaatccttcattcgttcaacgatgaaggatttttcgttttagcgctttatctcatatttttctataagagaatgaaccatcgatctgcttttttgttaagcttcttcagcttcaatgacgattgtggaatcattgtataccgcggtatcggtttccttcgtcattttacttgttaacagccctgcggtcatactgccgctgacatttaaggcggtgcgccccatgtcaattaacggctcaattgagatgagcagcccggcaagcgccacaggcatgttcaaagcggataggacgagcagagccgcaaatgtcgcgccgcctcccacgcctgctacaccgaatgaactgattgccacgatggcgatgacggaaatgataaatcccggttcaaacgggttttgccccactgtcggcgcaatcatcatcgcgagcatcgccggataaatgccggcacagccgttttgaccgatcgataagccgaatgaaccggcgaagtttgcaatgccttccggtacgcccatgcttttttgtgttttaatattgagcggcaaagcccctgcgcttgaacgggacgtaaacgcaaacaccataaccggaaatgcttttttcacgtatgtgatcggatttaaaccgctgaacgtgatcagcagcaagtgaatgataaacatggcgataagcgcggcgtatgaagcgatcacaaacatccccagtttcgcaatgctgtcgatgtcgcttgtcgcgatcgttttggtcataatcgccaataccccgtaaggcgtcagtcttaaaattaatgtcacgacgcgcataataatcgcgtaaaccgcatcgacaattccgctgaatgtcgctgcgtgctccggctgcttccgtttcacgcccagaaaagcgatgccgaggaaagcggcgaaaataacgactccgatggtggaagtcggtctggctcccgtgaaatcaagaaacggattccccggcagaagctcaacgatttgctgaggcagcgttttggccgtcatatcctcagatttttgctgcagctcctgaccccttgataactcagtgctcccctggtcgatatgaacggctttcagatcaaaggaaagcgccgaaacaattccgactgccgcggcaattgctgtcgtagcaatcaaaattccgatgatcagtccgctgattttcccgatgttatgggtcagtttcagcttcgtaaatgcgccgagaatagaaataaagactagcggcatgacgatcatctgaagcaatttgacataaccgccgccggcgatattaaaccaatcggccgtttgtgtcacgacatgtgaggccggcccgtaaatcaattgcagcgcaaaaccgaatacaatgcctaatccgagtgcggtaaagacacgtttagaaaaggaaacgtgttttttttgcatcacaaacagacctgctataaacaaaaacaaaataaaaacatgtaagattacaaataaattctccaaaacaggtaaacactcccttgctcattatccttaaacactatattacatcaattccgatcggtcaagtaagaattgacaatatatgtatttttattgatttttctcttttctttccatcctttctttagtaacttatataagggtgattgttatgctgaaggaactgtttcttaatttgacgattttaatcacatttaattatctcttcaccgttctttttaaagagtcgctttcacataaagaagaccgtccgatgtttcaattactgaaggggacggtctgcgggcttttaggggtttttctgattgctttcggcttttcttactccgattccatcattgatctcagaaatatccccattatcattgccgctctttacggaggctgggtgtctacagcagctgcctttatcattatcgtggcaggccgtatcctgatcaatttcaatgccagcgccatttattctatcgccgcagtcggcatgattgcgatactttctgtggccgtattcagaggaaaaaagccgaatcacaaaaatgcgttcgttatgctgctcttttcaaatgttattatcaccctgacgctgttgttacttatgcctgaacagcctgccggggccctcgtttatttttggctcatttctaccttgggcggaatgctgtcgctgtatatcattaaacacgaagccgatgcccgccttttgttcaagcaatacaagtttcaagcgaattatgattttctgacggggatttttaataagagaaaattcgaggaagtctcgcgcgttctgtacgatcgggcgtctcaatccccctcgtctcagctcgcgcttatttatttggatattgatcactttaagcagatcaatgaccaatacggccattatgaaggggaccaagtgctgaaggaactgggggcgcgcctgaggttcttactcagcagttctgatccgtcagcccgcatcggcggggaagaatttgccgtgcttatgcccaattgcacgtatacaaaagggcttcacctcgcagaagaaatcaggcacacgattgacgcgaacccgattctgctgacgagcggagatacaattcccgtgaccgtttccctcggcatcgcgcattatccgacaaatacatcggatcctcagacattgcccctgatcgcggaccggatgctgtacaaagcgaaaacatcagggcgcaatcaagtgtgcagcactgaaaaaaaagaatgatcgcccgaagaggaaatcattctttcttttcagtgagaaagccgcccctcaggaaaacaggaatcaggctgccctcatattctttttcaataaacgccgcggtatcatctgattgatacaaagacaggagtttttgcatccgttcatcatctttatcctcagccctgacggcgaccagatgaatatacgcttccttcatttgcgccgatcggatcagcgcgtccttctccgcatgaaatcctgctcttttcgcctcgctttgactgagaactgctgcgtcagcatgttccgccgcctgatatgcgttcttttttgtttccgtttttaaggtcagatgcttcgggttgtccttgatcatatcagttgaacccgtaccggtgaatccctttttcaatgtcatcagtccggcctcctgcatgagaaaaagcgccctgccgaaggccgccgcttcaccaggcacggcaatgaccgctccgtccggtatatcctccagccgtttatgttgcttggaatacacccccagcgatgccgcatatgtcgttcctaaaggagccagcttctttttcacatgaggcggcaaagattgaaaataagaaacggattgaaacgcattggcatcgagatccccgcccgcaagtgccaaatcggcctcggcataatccgaaaacattaccaaagaaagctgcaatccttcctcaccggcttttttcgcgacaaactcccagatcgattgatcagatccattgattccgatagtaattgtccggttcccgtcaggataatggcatgaagtaagtgacatgatcaaaatgaaaagaaacagactgtttataagccgcagattcaagttgacctactccctatctatttttatgtacagaagctgcaccatggtattcgggctcatgattacatacaataccgattaaaaaaagggttgtcaattgcttccttaagaggctgcaaagcgatttttctcagctgaaaatgggctgttctagtctcaaatcagatttccgtatcagagcgttctcctcttaaaacatgttatttcgaaaaaagttacatttagcagttgttttttcttcgaattactggtagagtaaaggtaattatttttgttcgaactatctttaagaagaaagttttgtaagagttttcgtcttggaagtttgttttagagcaagaatagtgaatttaagcgttatgtcgctttaggaggaaatttcatgttagaaggtaaagtaaaatggttcaactctgaaaaaggattcggattcatcgaagtagaaggtcaagacgatgtattcgttcacttctctgctattcaaggcgaaggcttcaaaactttagaagaaggccaatctgtttctttcgaaatcgttgaaggaaaccgcggaccacaagctgctaacgtaacaaaagcataaattgtttaaaaaccctgccggtgtacgccggcagggtttttttcatctaaaacgaaaagctgttttgcaaaggcaaaacagcttttttatatcaggtggcaatatcgcgttttaagaagacgccgaatgcgagcgccagaaaaataacgaagtaaatcacaagcatcacaaccgaaaatgtcatcgtcatcccctctactaaaggagtcccgttcatatattgcgacaaatccgtattggcgaataaaatatatttggtccattcaaatttcgtagcaagaaatacagtcgccgtgtttcccataaccaatagaaaaatagaaaatccgaccgctaatgagctgttccggaataccgcagacagcataaacgccatcgtcgcaagcataaaagcggagacagattcatagatatatgttttagcgaggaaggcgatgatattttgctcaaaaacatggccgtctttgtatacgagatgaacatcagccgcagtatctccccctgtaccgaaaaagaccaatcccaacagagcggagccggcaaataaaatcacaagcatcagcagtccgaacagcagcaccgtcatatatttagatagcaaaatctgaaaacggctgagcggacggatagcaagcagcttgatcgtgccccagttgaactcattcgccacaatgcctgcggcaatgataatcgtaaacagcccggtcaaaacagtcatcatcgaagaatcagctacgtatgaccacactgtataccctttatcctcagggatgttatgatccatacggtattgatttatcgcgacattctgtttcaggttatcaatgagagtctgatttccggtttccttcatctgctgtttcatttctttgttttcggcctggagctcctgtttccaattcggattggcttcgctcgaggtgaaatggtttgacagaagcgcaaaaccgatcatcgaaacgcctaaaattacaatcatagcccatgtgccgacgcggctgaaaatttttatccattcattatagatcagcttaaacatattgaacctcctctttcgtcccgccggtaatctccaagaaacggtcttccaaagattttgtcatgattttcacttcatataagcggatgttttcacggacgagcagtgaaatcacatcaggtacttcctgttttgacagcctgatctcaatgccgtttgtcttcttcacacagtcaaactgactcagaacggcaagagcctcttctctttgttcaagatggaagaagtatgtatctttatcctcttttccttcatcccttactttttgaatatcgacaagctcccctttttgcagaatgccgattcggtcgcacattaactccatttctgacagcagatggcttgagacgatgacagccattcctttttcacgtgtcagctttttcagatggtccctgatttccctgatgcccgcgggatcaaggccgtttgtcggttcatccagaatcagcaccttaggattatgcagcaggctttgggcgaggccgagacgctgtctcattccgagagagtaggtttttactttgtcatgtattctgtcctgcaacccgacgagctcgatgacctcatctattttttctttcgtaacgccttttaccatccttgcgtactgctgtaaatttttataaccgctcaggaatttgtacagctccgggttttccacgatggctccgacgtgcctgaccgcttttgcatagtttttcgtaatggattccccgcagattacgatgtctccctgagacagtttcattaatccgaccatcattctgatcgtagtggttttccccgctccgttcggccctagaaacccaaacacttcgcccgcccggacggagaagctcagatcatgaataatcgttcgtccttttatcgttttctttacctgttgcagttctaataccgtttccaattagaatcccccttctatttcgtgcgcctgcatggcgcttctgtaccattgcagcacggacattccttcctgttcccgaatttcttcgacctcgcgccgttcagcgattttcccttttatgaaaaccatcacttcgtctaacagcgtctcaatctcgccgatctcatgcgtggcgatgacgacaatctggctgtcaaaatcaatataagatacgagactgttgacaatcgattctctgaccgccggatcaagacctgaaaacggctcatccagcagaatgacggatgcttttctcgacagggtcaaaacgattttcagcctgccccggctgcctttggacagctcttttatcttctgcttcgctgaaagattcatttccgttaataggttatgtgctttttccagctgaaaatccgggaattgcgaatgataaaatgtgagcatatcaccgacggtcgtccgggcgaaaaacatatcatgttcggttaaataagccgtacgaaacagcatgttcctgcttactgcgcagtctccgatccggacggcgcccgaggtcgggaacgcaagcccggcaagcattttaagcgttgttgatttaccgcttccgttcggccctaaaattccgtagattttacccggagacaatgaaaatgatacatcgctgaccgcgagcctgcggccgtatttttttgttacgccttcaaaatcaagattcatcgtttccttcctccgcatattgtttgatcccgtcgatcatttcctcaggagataaccccagctccgccatttcctgaataaagcgtttgaaaacgtctttagtcagcctgtctttcagctccgctttcagatcggacctttccgctataaaggttccctgtcctcttctcgtctccacgatccccagcctttccatttcactgtacgttctttgtatcgtattcggattcactttcatctgtacggccatctcccttacggacggcagtttgtcccccggtgaaagctcacttcggatcagccggtaatatacacgatcggcaatctgcagataaatcggcttggatgactgaaattcattctccatcatcacacctcaacctttcgattcagcagcatagaggccagcgcgagacagagcgccgcaagcacgatcactgccaggaagctgaaaagcgagatgtggacggccttcagctccaccgtccagccggtcaattttgtataatgaaaatcaaaatccgcatacacttttaccggccataaatcatgttgagatgaagtgaatggcgtaatgattttatcgtcaatataggtccagacaaacgcaagcacgatgcagatcacccaccggaggacgggaacatgttttaatgagtgaaaaacagtccaaaagacggccacgatcacagataaatacgctgaactgatcagcaggtaagcattcagtccggttaatgtgccggccaggggaatggtgtgttccagcgctccttttgcagaaagcatccggtacatccaaatgccgtaaccggtcagcgccagctgcccgatcaactgatacagcagtgaggccgtcagcttggaagccagcagataaaatcctccattcggattgtaaagccacagctgattttttccttctttatgaaggtgatagtacataaaaagcggcgctacaagaaattgaaaaaaccccattgccgtaaaaaagccgaaaatgacgagcggttctttctgacgggcagcgatgacgtgggctgcaaacgcccagcaaatcatgccgcaaagccacaccgcaagccaaatccatgaaactttcgcatcttttttcagcaaacctaaaaacgatgtcattctttctctctccattcggatcaagtgtatgagtaacatagtacactagatcatcatgtattacaatatcttcaataaaaaaaagacaaatccgctcttacgcagatttgccttttcaattacttctttttgttttttaaggagagcagcgcatcacgatagctgctatcctgcattttgccgccgctatcaggatcgtttggttcctgatccgtctcagaagtcttaaacttctgaagcgcctgacggtacacatcatcgcccattgtattctttttctcacggggagattcagattttacaacgacgggagcatgctcggctgagcgctcctcggccggatcatgcttttccggctgttcggctgtagtgccgatcgcttctctcttttcttctttgacatcctgtcctgcagaagtgctgcggacattgaatgtgataagaagtgcaatcacaatgacagcagcaataaccgctataataatggccatataaccctctccttactgtcgtccggcagttagattacctgtgacttggctgacacgtctgccaagcgcacggcctaattgaaggccttcttccgtcatcagcacatcgctgtcaaccgggcatgtgacgcccgcaccgtagtaagagccgtacagcgcgttttcaggaacgttgccgggaagtccgacaacaatcatgccttggtgaaacataggagtgatcagattgtgcattgtcatttctaatccgccatgtgttgtcgccgtcgtacagaatacggcgccgactttatcaatcagctcgccttcagcccacagatagccgagtctgtcgatccacgcttttaagcctgaactgatggtgccaaagtgtcccgggcatccccagataatggcatccatgtctttcagcttgcggatgtctgcttgatcgacatgatcgatcaggacttcagcctcagcgttttctcgtgctccttcggcaatggcttcagcaaggtgttttgtatgttcgccttcactatcgtacactacgtaaattttcattcaggaaacctcccattcagatgattaagattccttcacttctttaggggccggaagcaatgacagctcctcttttttcttcgcccgctgtttgtctttccgtacgtcacgcaagaacaggctcaggactacgccgataaccgcaaagatcgtcgcccacataaacgcgtcattaatccccataacgttggaattaagtgaagctgttttgtagagataagaataaacggtttgtttcgccgcatcaagcgacatgttcatgttgaccattaaattcgaaaccgcgctttggaacgattgcatgaagcttggatcagccgtgctcgttttatccgcaatctgcgaatagtgcattgtcgtacggttcgtataaatcgttgtgatcaaacttgttccgattgaaccgctgatctggcggagcgtgttgctcatcgccgtgccgtggctgttcaaccgtgccggaagctggttcattccggctgtcataacaggcatcattaacagtgacataccgaatgcgcggatggcatagacaagcataatgtgcgtgtaaggtgtgtcaattgtcaattttgtgtactggaatgtcgttgcgaccgtgatgaccagcccgataatcgcaagcggtcttggaccgattttgtcaaacagaataccggaaatcggcgacatgatcagcatgacaatcgcgcccggcaatagcaagaggcccgattgcagcgccgtaaagccgactaagttctgcaggtaaattggaagcaggaacattcctgtgtaaagcgcaacggtaataatgatgttaatcacactggaaagtgagaaaatatcatatttaaatacccggaagtcgagcatcggtttttcagagcgcaattgctgaatgacaaacgcggcaatcgcgatgacaccgacaatgacggtagacagcacgatcggatctccccagccgtcgctgcccgcttcactgactccgtaaagcaatgaggcaaatccgacaatggatagaatcgcacccaagctgtcgagtttgattttttgcggttccaccaagttcttaaagaggaagaacgctatgataataacgattgccccgatcggaacaagaccgtagaacataatgcgccatgtgtaatgctcgatgatccagccggaaagagtcggtccgaccgccggagcaaacatcatcgcaagaccgaaaatccccattcctttccccctgctttcaggcgggaagataagcagaatggttgtcatgaccagcggctgcaggataccgccgccgaccgcctgaattaaccggccgatcagcatggttgagaagttaggcgcgattccgcagactaacgttcccgctgtaaaacagaacatggctacgagaaagaggctcctctgtccgaaccgggtaattaagaacgcagataacggaatcaaaacaccattgaccagcatgtatccggtcgtaagccactgaatcgtcgtcgcactcacaccgaactcggtcattaagtgcggcatcgccacgttaagaagcgtttggttcaagatcgccaggaataacccggccataagcacaataagcaatgttttaggactttttacttgattatctgatttagccacctaagacaacctcccttcatggtttgatgactgatctgtattattcagagatttttacagatgcgttcataccaggaagcaccttgtcagatgggttgctgagtgaaattttaacaggaactttttgcgttacttttgtgtagttgccgcttgagtttgaagaaggcagcatatcaaatgttgaatttgtcgcataaccgatttcttctactgttccgtcaaatgttgtattagggtcgccgtcaacaattacgtctactttgtttcctacttcaatgtctctaatgtctgtttctttaatgtttgcagtgatgtaaaggtgtttcatgtcaatttcctgggcaattgtcgtaccggcttgcaccatttggccgtttttcacttcgtttttcacgattgttccatccatgatggcttttacgtcagcattttgctgtcctttgatttttgcaacaacgtcgtttttgcttacttctttcccctcatcaaggttccagtcagttactttacccgcagcaggagctgtgatagcagccatgtcgccggcaacttttgcttcatcggtttttacatagtgtgtgctttgataatagtagtaagcacctccgcctataattgcaagaacaacaatcaaaccgataatgttggtcagaattaaacgtcctctgttcattttgttttctcctttcgtttcttcctctatcattttgtggaatgatgataaaaatatgtggggatttttttattttccgtttttcactgcacagccgtttgcaagcttcgttaaactttccgcaagcttgcgcaggtactgcagttcagcggtattgagctgccggtataagaccgccgctttttcggcatattgaacagcagctttctttagaagttcttccccctcttcggttaactgaatcataacaacacgccggtcgtcgtgatagtcgctccgaaccattaggcggcgcttatacagaatatcggtcattctcgtgacagacgccggtttcagatcaagcgacaaagccagccttgaaagctgcgtgcttttgctcttatgtattttgaacatcagcagatactgcagcactgtaatatcaaaaggttcaagaactgtctccagaatcattttctgctttttgtaaatcgatctggaagtatcaaacagttgttcaaaactgagcaaagcgagctctgattcaatcaccgtattttcacctcattcccttaataatagttcacaagataaaatattaataaatgaaagaaggtttgtaaagagaaaagtttcattttttaaggattttttttatgccgttttttctctttatttttaatttaaaaaagccgggtgaagaaccgcggccgcacgattcttcactcggctttatatttcatacgatgctttgcttacaccggcttcctcatttttaaaaaagcttttcagcgcttgaaatacgtctgatttctgtttcaggatgtagtatttaaatttatcatctttgacatttttataggcggacatgagggtggaatgcctgttatattgattgacctcaccgtaacagaacagattcgattttttcatgatgtcattgacgagctttacgcaccgggcgttatccgaagtcaggttatctccgtctgaaaaatgaaagggatagatattgtagcgggcggggtcatatttttcatcaattaattcaagagacttccggtaaacggaggaacagatggtgcccccgctctcccctttcgagaaaaaatcttcttccgacacgaccttcgcttccgtatggtgggcgataaattcgatatcaaccgtttcatactttgtccgtaaaaatcgtgtcatccaaaaaaagaagctcctcgccatatacttttcccatacgcccatcgaaccgcttgtatccatcatcgctaaaacgacagctttcgattccggcttcgtcacatcattccatgttttgtatttcagatcttccggataaatagggtaaaacgacggcttgcctgtcatggcgtttcgtttataggccgacagcatcgtccttttcttatcgatattccctgtcagcccggttttccggatatcattgaactcgatatcggtatggacgatattgtccctttccttttgctgcagattcggcagttctaattcctgaaacagcgcttcttccagatccattaatgaaacttccgcttcataataatcctcgcctgcctgatcgccggctccctggccttttccagccccttgctttttatctgcgccgtctcttgcgacgacatcgccgacttcgctgtcgccgtcgccttggccgacatgtttatttttatcatagttataacggattttatattcatcaagcgaacgaatcgggattttcacgacatcttttccgttggacataataatgctttcctcagtgacaagatccggaaggttgttttttatcgcttcctgtactttcttttggtggcgctgctggtcgtcaaagcctttgcgatggagggaccagtcttcctctgaaatcaaaaaatttccgctgtcattacgggacatgaattcccctccttaaccgttatggtcgttttacatgtgtattccggcttggtcctgtttatgaaacaagtccggcgaaaagatttatttttatcttatgccggccggactctccaattgacaaacaattgcgaaaaacagacaaaagaacccgtccttttacagacgggcctctcaatgaaatcaaacatcagcggtttaacaagcttccgacatatttcagcagttcattagcgcttgtcgaattatagccgtgttcatctattaaccttgccactacctcattgacctttttaagctgctgttcatccggcgttttggtggaggtcgtaattttcactacatcttttaagtctgcgaacagctttttctgaatcgcttcgcggagcctttcgtgcgaattatagtcaaagcgttttccttttcttgcataggcggatatgcggattaaaatttcttcgcggaacgcttttttcgcgttttctgaaatgccgatctgctcttcaatggatctcatcagtttttcgtcaggattcatttcttcacccgtcagcggatcgcggagcttatttttattgcagtacgcttccacattatctaaataattgtccatgagagttttcgcggattcttcatatgaatagacgaacgccttctgcacttcttttttagcgatgtcatcgtactctttcctggcggcggaaataaaattcatataccgctctttgtcctcggcggagatggacggatgctggtcaagtccttcttttaaggaacgcagcacgtcaagcgaattgatcgattccatattttttctgataattgttgaggaaatgcggttgatgacatagcgcgggtcaattccgctcattccttcatcatggaattccttcttcatatcctcaagatcaacggaattgtaaccttcaacgctttctccgtcatagagcctcatttttttgacgagatcaatatcagagcggttcggttccttcagccgggtcaaaatagaaaacatcgcggccacttttaatgtatggggggcgatgtgtacgtcagaaacatcactttcagaaatcattttttcataaatccgttcttcctctgacacctttaaattataaggaacaggcatcacgatgatcctggagtgaagggcttcatttttcttattggcaataaacgagcggtactccgtttcgttcgtatgcgcaacaaccaattcgtcggctgagatgagcgcaaaccgtccggctttgaaattcccttcctgcgtgagtgacagaaggtgccacagaaatttttcatcgcatttcagcatttcctgaaactccatcattccgcggttcgctttatttaattcaccgtcaaaccgataagcgcgcggatctgattctgatccgtattcggcaattgttgaaaaatcaatactccccgtcaagtcggcgatatcctgtgatttcgggtcagacgggctgaaggttccgattccggtacgtttatcctccgagaagaatatacgttcaacctttacatcctcaattctgccgccgtattcttcttcaagccgcatgacattaagcggagaaaggctgccctcaattctgatgccgtattctctgtagaagtcgtcgcgcagatgatggggaatgagatggagaggatcttcatgcatcgggcagcctttaatggcgtaaacagcgccgttgtctgtcaatgagtaggcttcaagcccttttttcagcatggtgacaagagttgactttccgccgctgacgggtcccatcaatagtaaaatccgttttcttacatcgagccgcttggcagccgggtgaaagtattcctccacgagccgttccagagattcctcaaggccgaacagctcccgcgagaaaaagctgtatgtctttttaccgtcatcctcctcgattccgctgtcttttatcatattaaaaacgcgagaatgagcagactgcgcgaccaatggattttcttttatgatctccaaataatcagcgaacgtcccttcccatttgagacgctgctcttcctctctgtacttttcaattttctttaatatatccataagaacctcctctatcatggttaatgcactagaaataaggtactttgttacaatctatgcggtgacgtgataatacatgcttttcgtttcttaaaaataaagacgttacaaggccgtcattgacaagggtccggtgcaccgttcataatgaaagaaatacagtttcatccagactcggacatcaaatggaaaagcaaagaggaggagaaatgatgaaaacgatcattttacttggggtcattctcacttttttagtatccatttttacggcgggttacgacagcaaacctgaaaacaaataacggcaaaagggtgctctttatgaagagcaccctttcctatacaacataacaatgtttcatatttggatatgttcttggacagttgatttttcatgagatttgcagcttgtttgatactcgattttttcgattttgcaacccgggccgatttccacatgtttccctctgacgatgtccgcttccgtgtattcgagataaattgcgtctccttcgatcaattcagcagaaagcgtgccggctttccgtttaagaaaaccgggtttccgtctgacggtgatcgatgtgccgccgatttctttcacgcggcttcggtcataacgcaaatggatgtttacgtcccccgcgtttaacaatcccgccacattgatacatcctgttacatgaagcagctccgtctcgcaatcgccgccgacggtgagactgccttttatatgacactgctctcccgcggccccgccgccaatttcagcaagtcctttcagcctcatcgtggcgaaacgcacggagccgccgactttcaatgtgccgatcacatttgctgaacgtgctgataaatctcctgcaacttcatgctctccgaaaattttcagcctgttgatctcggcatctccgagaaaaagtcccgtaccgaatatccggcagcgttcgctttgaagtccttcgccgacagttccttcccctttaatgcttacattttggtaggaaccgccggaggcgtgtccggctccgtacatttttaaatgactcaatttttttgtcgtttccatcgcagctcctcctatcgtttcacgactttgttaaccaaagcggaaggatcacatgtaaaatcgccgctgtattccacagtcccaatggtgcagcctgcgccgatctgtacatgatttccgcggactgtcttcgcgttcgtgtccgccaattcaatgatgtcaccttcaatcagctctgctgtcagcaccggggccggcatcagcttaaaacgcgtaagcacgctctttctgctcatcactttcaaatggcggcatccaatttctttcactcggctctctcccgccgtcagcttaatactgacttcatcggcattcagcaggccgccgatcttgcatttgccttccgaacggaacgtctctgtctcgcaatcgccttcaatcccggctttcccggatatgaaaatatcatcagctttcacaccgccgccgaaagatgaaaatcccgcgacgttcagccgctccgttttgacatcacctttaatgacacccgttccgttgatacggatggattcagcttcggcactgctggaaattttccccgaaccgctgatcgtcagcgtttgcgtcttgacatgtccgtctgtttttccgctgccgttaaacaaaaagctcgcgcactccacatcacctgacaccgtgccgcttccgttgatctccactgtatgaaaacggcctccttttgaacttcctgaaccgttgatgattaatttatctgttacttccattgatggtcctcctgcatccatttcgtttttaattcttccgatgccgcagcaagcgccacccgttcaaccactttgacagtcggttcaaataaaatatgttccgcgtctgcgatgaagcacgtcgttacgccaagctttcggagcatgacaagctccgtatttgctttcagttcggaagcctcatacgttttcagcacccctgccgccaattttccttcctcaaggctgatattgcccgatcgcaaaagtccttcaagcacatataaagacagcagcgcgcgggacgtgaatgtcacgccgtcttcgccataaacttgcagcgcggcttttgaaatcagtcccttttgaagcagctccgcagacgttatattgacatcagtcatttgcggagacagcatttctctcatttcatccaaagacagattttctttcattttctgtatttttgagatgcgttttaatatttccgctctcggaaaaaatgtttcctggcctgtaaatgttgattttcggataaaccattcttcaggaattaaatttttccgtttccagcggtacagctgcccatatgaaattgatgtttcttccagcaattcttttttagaaatcagttgttcctccatgaatccagctccttcgatgaaagtattgtaacataacactgttacgttgttaagcctggaaatataaaaacgccgtgaaccgctgctgtccgtcttttttattcaataaaaaaacgcccggatgcgggcgtttttttcacgtcaaatctctgtaattttgctggcgcagcgcttcatatacaagaatcgcggccgtgttggacaggtttaatgatctcacatgctcggtcatcggcagacgcaggcagcggtccatattgttttcgatcaattctttcggaagtccgctcgtttctctgccgaatacgaagaaaaagtcttcctccgtatttgagtaatcaaatgatgtgtgcggcttttggccgaattttgtaatgaagaaaaactttccgttctcatatgcctcaaataactcttccaatgaatcatgatatacgacgttgacgaactcccaataatcgagtccggcgcgcttcagcattttatcatcggtcgagaatccgagcgggcggatcaaatgaagcgttgtgtctgttgccgcacaagtacgtgcgatatttcccgtattggccgggatttcgggttgatataaaacgacatgtaatgccacgatgttcacctctgttttttattccgcccaccattatatcattaattactcttttgtcgtatcatccgtaatatgaaaaaacgcatatctgatggaaggagtatacgccgttgaatcctcatatgaccaatatctcattctgctgtcatacgtttgggcattgacaagcggcatattgcttttatctttcgcgaccacgatcgccgtatgattaaaacggccgtccccttcaaaatcatagcaaataatatctccgggcatcagttcttcagctcttgatacttgcaccgcgcgaagccctgccttggattgggccagatacatcttcatcgaatgcgcgaccgtccagctgtagctccacgagcttgccttcatccaccagcctgagcctctgttcggatgcccccgcatcggtgcttttccggcatgtaaacattgggaaataaaattggtgcagttgtcgctgaaatttttataagcgggatttcgtttattccaaaacttctccgcatactgcacggcagccagacggtcatattgaaacgcccgcccgaaatcttcccgttcactccgctcatattcaattacactgtttccgtcagaaaatcccgccggttttttctttacttcccggtctttaatcaaaagccgatcatagagaaatgcagtccgttcctcaatctgctcttctaagtaaaggtgtccgtcatgctccttgcacaaatattcgaaatgaatcgtgtacatgacgcataacgtgccgtcgtcctcaaggctgcttttgacaatgacggcttttgccttcgctttcacgatgtcaactttccgtttttcaaacagctctttttttctcgtcaggacctcaagatcgccgggctgcccattgtgcctcatctcggttccgttgattaaataatgaagccgggcctccgctaaatcttcaataatatgcttcaagcgctccacccaccatactgttttataaagaaaaacacttgaactcacgccaagtgctttttctctatacatatgtcaggaccggccggttttagtcttatcagaaaccgataacagctccagtcccttttcaatttcccgtatagcttcctcatcctgctccttttgaagcgctttttctaattcccccgcataatcaggatcaccgattttcccgatggcccaggcggccgtccccctgataacggggcgtggatcttggtgcatcaaggccgttaattccggaagagacgaggcatctttaaaatgagccaaagctaaaatcgcattccgctgtatcggcttcttgccgcgccatgatcccgatacatgtccgaatttttctttgaattcgcggttgcttatggtcaaaagcggctttaacagcggctttgcgatttccggatcaggctccatctgcggatgaagatgaaaatctttccccttattaatcggacagaccgtctggcacgtgtcacagccatacagacggtttccgattttcgtgcggaactcatccggcaaaaatccctttgtctgggtcaggaacgaaatacagcgctgggcgttaagctgtccgggattgacgagcgcgccggtcggacacgcgtctaaacattttgtgcacgtaccgcacatatcttcaatcggcacatccggttcaaagggcagattggtgatcatttcagccagatagacgtaagagccgtattcaggcgtggtgatcatgcagtttttggcgctgaagccgattcccgcccgttcagccacggccctgtcggacaattcccctgtatccaccattgactttgtgcggatatcctcatgtttgctttggagaaaattctccagcagatcaagcttttccctcagcacgtcatgataatccttcccccaggaagctctgcaaaaaatgccgcgccgcccgtccctcgtgctcctcggcgcatctttcattttggaaggatacgcaagggcgatggcgacgattgatttggctttcgggagaagcaaagacggagtaacccgtttttcaatatccggctcttcaaaaccggataaatagccgagtgattcctgaagaatcagccggtcccgtagactgtcgaacgtatcagccgtcgtaaacccgattttgtcgactccgatgcttttggcgtattcgattaattcctctttcagtttatgaatattcattttttgcacagcctcctttctttgtgatcaggctcccgcacaggtataatagagttttatcatcccgaaatggagtgaacacacttgaacatcagtttagatccacttattgctgaacgggtgccggggatcaaagcggcagccgtcttatatgaacagatcgaagtcgggcctgctccgcaaatgctgaaaggccgcctccgtttatttcaagaatctctttactttgattatgctgacgggggtatagaagagcagccttttgtaaaagagtgggcgcgtataatggaacagctcagtcccgccttttcaggacaaaaaacgccgatggagcttatgctcggcgatatttcccgggaacgattcattgaaagtgtgaattcagcccatgataccatactttttttctccttgaaatattcattgcctatcatggcgtatgatgccgcagaaatagatcaaccaatttcaattacgatcggagaaaaagaaagcgtactgtctttctccggcccggacggcgttttcggcgacttcaccggacatatcaatacacgccctgtcacgcccggcacaaagaaaatgctgcagctgatctttttcccgccttcatttcatgccgacgcggcggatgagctgctatcatccttaacaaaaatgtttgaacaaattcacggaggcacgcataccgtctcttggctttcataaaaagacacgccttcgtgtcttttttcacataaaaaaacgcaatacttcgtttatcagagaaacgaaacactgcgttaataacgtatgtatggagcgggtgatgagaatcgaactcacgacatcagcttggaaggctgaggttttaccactaaactacacccgcattaaaattattttttgtcagtaccgatttgatgtttctaatattacatgtttatttttttttcgtcaagggaatgttaaaaaatttgtcgaaaaaagttctttttttgtccacatgttaagttgggtttacattttgttaagagtctcatacaatataaaaaagaagaaaacttgaggtacgcctgatgatgaaaaataaagtaaaagagctgagagccagattcggctattctcaggaaacgctcggaaaagaagccggagccaccagacagacgattgcagcgattgaaaaaggagattatgtgccttcacttttattggcgcttaacatctgccgggctttctccctgccgatggaggaagtgttctggctggaggaggagaaaaaatgagtttgaaaagaaaagcgtgttttcaccttgcactctacggattggcctgctggacgcttatttcctttatggaagcggcgccgcggatcgctcagtttttccaaacggaggggagcggttcatttgagctgaatatcactccgtttctgctgtttaccgtttgtgccgcattgtatatctatgccgaaaagaaaaaacgaaacggcaaaaagcacaggcttgtacccgatgaatttgaggaacaggatgaaagagaacgaatgatgacggctaaagcttgccgttcctcgtatatcgccgtttacttctcattgccggccgcagccgttctgcttttgttttatccgctgattcagccgcatcttcccttttttccgattcttttgattttcattctgatgatgattcagcatttggcttatgctttcacttttcataagcacggcaaaaactccggttcatgacagatccggagttttttacattaccagctcgcttttttcaccccgggaatccggcctttatgggccagctccctgaatgcgattctggacagtttaaattttctcatatatccgcggggccgccccgtcaccgtacagcggttatgaagcctgcccggagcagaatcacgcggcagtttgctcagcgcttcccagtctccttttgcctttaattctcttcggatgtccgcatattgttcaacaagcttctgccgcttgagctctttgatcacttttgatttttttgccatttcagcactcctaacaaatcgtaataattacgttttgtatcatatcatccatattagcatcgtgcaagctaagcgcttaaaaaggcgggtgaatacccgccttcactgccggcatttccccggaaatgaatccgcagaaagcgcccgccgtcaattatccgccttgcgacgtcatcagactttcgctttatttcctcttgcaaaatggtcgttgcccattgcttcacccagtctgcgctcaagctttttagtccgttcattctgaaacggcagaagcggaaacacgagttcagacagataataagcttcttccagatgcgggtagcctgaaaagataaacgactcaatgccgagtgcctgatactctaaaattcgagcagcgacagtctgcggatcaccgacaagtgccgtgcccgctccgcctctgaccagtccgatgccggcccagagattcgggctgatctcaagcttcgagcggtcaccgttatggagatcggccatccgtttttgtcccgatgaatcagcgcgccgaagcgcagcctgcgctttcgcaatcgtctcttcgtctaagtggctgattaatcgatcagccgcttcccatgcctcttcctcagtctcccggacaatcacgtgaagtctgatgccaaaacgcatcgtccttccttccttggcagcctgttttttaacggtttcaatcttttcttttacctgctccggcggctctccccatgttaaatagacatctgtatgtttcgccgcagcttcaattcccgcctgtgatgaaccgccgaaatataatggcggatgcggagactgctttggcggaaacagcagattgctgttttccactttgatatggtccccttcatatgtcaccgtttcgccccgcatgagtccgcgccagacggttaaaaattcttcagtcgccttataacgttcatcgtggctgataaacatgccgtctcccgccagttcataaggatctccgcccgctacgacatttacgagcaaacggccgtctgacagccgatccattgtcgacgccattctcgcggcgacagacggctgcatcagtcccggacggaccgccactaaaaatttcaagtcactcgtttcccccgctaaagcggcagccgtcagccacgggtcttcacatgatctccccgtcggcagcagaacccccgtatacccgagtctgtccgccgcctgtgccacttgcttaaaataaagatgatccgccgttctccctcccgtttgcgtccctaaataccggccgtcaccatgggtcggaataaaccaaagaatctccatatgaatctctccttttttaataggttacccttcataactgttccgccattttaatagtttccgttcgagcattctgaccaatgcatctgtcagcttgccgacagccgcaaaaatgataatgccggcaaacaccttatttgtctgtgaaaattgtctggcatccataatcatataaccgacgccctcgctcgatcccatcagttccgccaccacgagaccgagccacgcaatgcctagagagagcctgatgccgagcaggatattcggcagagatgccggaagaattaatttcgtcatctgctgataccagttaaattccagcacccgtgcgacgtcaaacagcttcgcgtccacactgcggattccgagaaacgtattaatgtacacggggaaaaatgcacctaatgcgatcagcagaatttttgatgtctcatcaaacccgaaccacaaaataaacagaggagtcacggccaagtgcggaaccgttctgagcatttgcagagacggatctagatatgcttccgtccgctttgagaaaccgaccagcagcccgaaaacaagtccgaggcccgcgccaagcagaaatccggcagcagccctgtataaactgatctctaaatgaccccaaagttcacctgaaagaagaagttcctgaaacgtctgcaagatgacgacaggtgaggggagcaccgtggccgagacgatgcccagacttgcgataaactgccatactgcgatgaccgcagccgggagtacaatccctttcatccattggtatgaatacttccgggatcttgccagagctttcttttctgattggcttattgcgccggcagccgttgatgcttctgctttcattacttgccatcccccgtttcaagcgcttttttaataaatgaattgtcgacaacgtcttttacatgaattttcttatgaatcgcttttgtttgatattgaaaatcagcggtttcctgctgggctttgacaatatcatcattgatcggttcattgagaggctcagtattgttaagcacgtttctgacgactttcggatcaagatgtttgattttcgcatataaggagacagcttcatctttgtgttccttttgccatgcaactgctttattgaacactttcagaaaacggaccacctcatccgggtgttctttggaaaatcccgttctgactaacgtgaaaccgggagaatataaatctgtgctttctccgttcgccaatatttccgccccgtgctgcagcgtttcaattgacaaatacggctcccaaatggaccatgcgtcaactgatttgttttcaaaagcggaaaccgcctcatcaggctgaagctggatgatggtgacgtcatcggcggaaagccccgctttatctaaagctttatagagaaaatcaaagccgctgctgcctttggctacagcgatttttttacctttcaattctttcaggctctgaatcccgctgcccttgtttacgagaatgccgtttgcctttaacccgtcctgagacagcccgatctctttaaaatcaatccctgccgcctgaccggaaatgaccggtgaattgccgacctgggaaaaatcaagcttatcggcggcaagaccttcaaactgcggaggaccgctttggaattcgacccattttacttttattccgtcttttttgaaggcctcttcaaaccagcctttttccttggcaatgagaagcgggcttaaactctgctggatgccgatccggatttctttcaccgttttcccgctccctcctgtcctgtctgcactgcatccggctgacatcatgactgctgcggctaaaagaatgatgatttttttcacttcgcttcgtcccttctatattccggacccatccgcaaaccggaggtcttccgttttctcaaattcagaaagcaccttctgccggacggcctgaaaatccgctgacgtccgattgcgcggattcggaagctgaatcggcatcaggctgtgcagccggccgggctttgccctgaggatcgccagcttatcgcctaaatagacggattcatcaatatcatgcgtgaccagaatcatcgtcgtttttttctcgcgccatatatcaagcagcacatcctgcaaatgttttctcgtaaaagcgtcaagcgccccgaacggttcatctaaaagcagcacctccggctcacgcaaaagggctctggcgatggcaacccgctgcgacatgccgccggataattcgcgcggataagcgttctccgctccctgcagcctgacaacctcaatcagatcatccacttttttccgaacggccgggtcgttcatattgagatcggcagcgatgttttgttttaccgtcagccagggaaacagccggtgctcctgaaagataaatccctgccggatgcccggtcccgatacattgcggccgtttattgtgacagagcctttataatcggtatcaagaccggcaatcaattttaaaagcgtgcttttgccgcatccgctcggcccgatgacagtcaaaaattctcccgatgcaattgacagctcaatatcattcagcaccggcgttttccggccttcatgctcaaaagctttttcttgtatgctgatggttacagccatctgtcttcccctctctttctgccgcgtgcgatcgaaaaacaaaaaggcccccatctccgattgcttgcagagatgggagccttcggcggtccgatcggcaacccgtttgtttttaaatttgaatatcatgttaattcaaattattccgacttgtcaactgttttttataaggattaaaatacgccctccggcataaccctgccagagagcgcatcggctgtatcacgtatttacttccttttcttggcgggcgattttcaataatgtccgcgcgttgttgccgaaaatgttctctatatcttcttcccgcatattgatttcccggcaggtcctcacctgctcctgaagatatctgtatacatatcctctcggaaatccgttcgaatccgtcccgaagatgatccgttcagcaccgattaattcagatgtcttccgaaacagaatttccaaatcaagcgggtacggcatccacctcatccactgatttgagccggacgtgtcaatatacacattcggacagctccagcacagctgcagcagttcctgataatatccggcgccgaaatgcggaatgatgaacgggatatcagcatactctctcgcgacgcgatagatggagagcgggttgatgttgcgatggctgacaatgccccccgctcttcctaaaagcccgaagtgaattaatacaggcagccttttgtcagccagatacgtccacagctttttcagcgacggatcatgaaaatcgatgtctgtcagcggcccgaacagtttatatcctttcagaccgagctcttctaccgctcttttcagctcttcatacgcatcctcccgctccaaaggatgatatgcaaatccggtaaatctcgcgggattggcttgaataaacgccgccatccggtcattgctctctgctgttaaaaaattcagcacgtcaatgccgtacttatctaattcattctcccatcttgtcatcaaagcgatttcgccgtcatcgccctcaacatcatgcggatcaggaaaatcccaagtcagattcattctatctgaccgctcccggttataatcggaaaatgtcttatcgtttttgccgaaataaaggctgtacggcagatgaccgtgaatatcgacaggtttaaaatgctgccggaaaagcatacaatcgccgcctcccttaccgcctgacaataaaaaaaggcccttatccagtgaagaataagagcctcttgtgtccaagtcggcggtttctattttttctcatcttaaacccattattcccgtcagtcaagtaggctttcaaatccaaaccctttcttcgataataaaaataattattttataatcattataaaataatattgactttttactgataggtgatattatgtttttataaatctaaagaggtgatcacatgagttcaaataaattgacaaccagctggggcgctcctgtcggagataaccaaaactcaatgacggccggcgatcgcggtcctgctttaatacaagacgtccatctgcttgagaaattggcgcactttaacagagaacgcgttcccgagcgtgtcgttcacgcaaaaggcgcgggcgcacacggttattttgaagtcacaaatgacgttacaaaatatacgaaagccgcatttctgtcagaagtcggtaaacgcacgccgctcttcatccgtttctcaaccgttgcgggcgaactgggctctagtgacacagtgcgcgacccgcgcggatttgccgttaagttttatacagaagaaggaaactacgacatcgtcggaaacaatacacccgtgttcttcatccgcgatgccatcaagttccctgactttatccatacacaaaaaagagatccgagaacacatctgaaaaacccgacggccgtttgggatttctggtctctgtcaccggaatccctgcaccaggtaaccattctgatgtcagaccggggcattccggcgactcttcgccatatgcacggattcggaagccatacatttaaatggacaaatgataaaggcgaaggcgtctggatcaaatatcactttaaaacagagcaaggcgtgaaaaaccttgatgttaatacagccgcaaaaatcgcgggcgaaaatcccgattaccatacggaagatttgttcaatgcgattgaaaacggcgatttccccgcatggaaattatatgttcaaatcatgccgttagaagacgcaaacacatatcgctttgatccgtttgacgtcacaaaagtatggtctcaaaaagactatccgctcattgaagtcggccgcatggttctgaaccgcaatccggaaaattactttgcggaagtagaacaggcgacgttctctcccggcacattagtccccggcgtcgacgtctcacctgacaaaatgcttcaaggccggttgttcgcataccatgacgcgcatcgctaccgtgtcggcgcgaaccatcaggcgctgccgatcaaccgttcccgcaatgaagtgaaaaactatcagcgtgacggacaaatgcgttttgatgataacggcggccgctccgtctattacgagcctaacagcttcggcggcccgaaagagtcacctgaagataaacaggcggcatatcctgtatcaggtttcgcagacagtgtaagctataatcatcatgatcattacacacaagccggcgacctgtaccgcctgatgagcgaagaagagcgcgcgcgccttgtcgccaatatcgtcagtgcgatgaaacctgtggaaaaagaagaaattaagctgcgccagatcggccacttctacaaagctgatcctgaatacggcagacgcgttgccgaaggactcggactgccatcaccaaaataacatcaaaaaacctgccggtctgcccggcaggtttttcctgtttattatcaataaaaccgtttttttctcaattatacgaagtggcatgccgcaaaatgatgaagccctttttctgacagcgccggacttttctcagcacatatcttcttggctgccgggcatctcgttcggaatttacagcctgaaggcggatcagaggggctcggtatatcaccctttaaaattatccgctcccttttcactccgggatcaggaacaggcacggctgataacagcgctttcgtataaggatgaagcggccgtgaaaagagctcctcctttgacgcgtattccacaatcgtccctaaatacataatggcgaccttcgtacataagtgctccaccacgcttaaatcatgagaaatgaacaaatatgacagcccgtgctgtttttgaaggctgctgaacaaattgatcatctgcgcctggatggagacatctaacgccgccacgggttcatccataatgataaattgcggcttgagcgccattgctcttgcaatcacgatccgctgccgctgccctccggaaaattcatgcggataacggtcgataaagtttgcggaaagtccgcaggcttcaagaacttccgccgctttatcacgcgcgttccgcttcaccaccaattgatgctcgatcatcgcttcaccgatggcttctccgatccggcgccggggatttaaagaactgaacggatcttgaaagatgagctgcgcttctgatctgaaagttttgagctcgcgccggctcatccgaaacacatcacgcccctgaaaaaacacctctcccgctgttttttcatgaagcctcaaaatggtcttgccgattgatgactttccgctgcccgattctcccgctaagccgaacacttctcccttttctatcgtaaaactgacaccgtcaactgcttttacgggatttttgcgggtctttctcatccccccatgctcctcgtaatattttttcagccccctgacttccagcaatacatcactcatctgctttctcctctctgtaaagccagcacgccgcctgatgccccttcccgaattcagtaaaatgcgggctcgatttccggcatatttccatgctgtgttcacatcgctccgcaaaataacaagacgatcccgacaggtccgcaagctcggggacctgccccggaatggtgtacagcgtctcccttctttgaccgataaccggcttggccgcgagcagccctttcgtatacggatgcttcggatcagaaaacagctttgcaaccggtccttcctccacaatttttcccgcatacatgacaatcacataatcagccatttcagcaactacgccaaggtcatgagtaatgaataaaatagacatgcgaaattgctttttcatatcccgcaataaatccaatatctgcgcctgaatggttacgtcaagcgctgtcgtcggctcgtcggcaatgatcagtttcggttcgcagcttagcgcgacagccgtcatgatgcgctgcagcatgccgccgctcagttcatgaggatattggtgcataacctgctcggcatgcgggatctccactaacgtgatcagttcaacggccctccgccatgcttctttcttactcagcaataaatgttcgcgaatcggttcggccagctgctcaccgattgtaaacaccggattcaaagatgtcatcggttcctgaaatatcatcccgatttcgctgccgcggattttctgcatgtcttttggtttcaattccaacaggttccgtccggaaaaatgcaccgctccccgttcgattctccccgtctcgggaataagctgcatagtggacaatgacaccatgcttttcccgcagccggactcccctacaatacaaaccgtttcctcctcatgtatcgtaaagctgacatcgtccacggcctttaccgccccctcctctgtataaaaagccgtttccaaatgcatcacttctaaaagcggttttttcatttcattttcacctgccgttttaccttaggatcaaaagcgtctcttaaaccgtctccaagaagatgaatcgccacaacggtcagaaaaatggccgttcccggcggaatccacagccacggacggagtgtaaaatccataaaatgattcgccgcttccatcatgtttccccaagaaggtgtcggcggagcaacgccaagcccgagaaaactcagcgccgattcactcagcatcgctcccgccacatgcaaagtcgccgctaccagtaataacggcaatgtattgggaagcaaatgatagaggattttccgtttatcactaagccccaaaacttccgcggccatcataaacggctgctccttcagcgacaaaatctgtccgcgtacaagccgcgccagaccgggccatccgatcaggcttaacatcatcataatcaggtacatcctgtattcagaaggcactttccactccgacatcaccgcagccaaaatcaaaagcagcggcaggcccgggatggacatgagcatatcagcgatgcgcataatgatcatatcagcggctccccgataaaatccggccgcagccccgagtaaagaaccgatgacaagcgacagcaccattgaagcaagccccacggtcagagaaatctgccccgccagcatcagcctcgtcagcacatctctcccgtactggtcggttcccagccaatgatggattcccggctgctgattggcatttgaaatatccgtccgatctgttatgtacggagaaaaagacggcccgataaagcacaataaaaacataaaacataagaaaagaagactgatgaccgtcagcttatgatgcagcaggcggcggtacgtctgcttccaaagagaaggcggcacccctttttgttttttcatttcgaacaccccctatttcagcctgacccgcggatcaaccgcggcataagcgatatccgccaagaagttccccacaatcgttaaacaagacaaaaacaatgtaaacgccatcaaaaccggataatcacgataatgcacagattcaagctgaatacggccgacacccggccaaccgaaaatctgttcaataatgatggctccggaaaacagtcccggcagttcaaaagcaagcagggtgatggccggaatgagcgcgtttttcaacgcatgtttccagatgacggtgcgctctttcaatcctttcgctctcgccgttctgatataatcctgtctgatcacgtccagcatgccggagcggaaataccttgtcagcgagccgatgccgagcatagataaaatcacgaccggaagaatcatatgtctggcggcttcaagcacgtacgaaaaacctgtactcgtgcttccggtatcaatcatcccgccgacgggcaatattttcaaatccaccccaaaccacttaataaacagaaggctgataaaaaaagacgggaacgccatggaagcaaaaacaagaaacgtcacgatcccgtcaaaccatgagtatttcctgacagcggatatgacacccgttatcatcgcggctgaccatgtgacaagcaacgccaaaaacgcgacaaaaaacgaattccagacatatttccgaagcagtgacaggacgttctcctgatattttaaagaaaacccaaaatctccgctgagcacatttccgagccacgtcacatagcgctgccaaatcggctgatccagcccgtaaagcgcttttaactcctgcgctctttcaggagtcaggtttacattggaatcaatatagtcgcccggcagcatggcgaataagaaaaaaataataaaggacgtaccaaataagatcacaagcatttgaatgaatcgttctgcggcataccgtttcacaaaaagcccctcctttccgctgaaagggcaaaatccccgggatgcaccgggtattttgcccaaccgttctattgaattgagacatttgagagacttgaactgattccagaataattgtcaggctcaagcccttttatttttccgctgaccgcccttgcgctctgacggtaatgaatcagaatgtaaggcgggttttccccgagctcccggtacagctggtgataaatctcttttcttttgctgatatcaagcgtgccggctcctttctctatcagccggtccgctttcggattggaatatcccgttacattattgggatggccggaagccagcttttccaccgtgtcattcggatcaagaatctgcgaggtggaaacggcggcaaggtcatattgtttgtcatttattttcgctacttctgtattaaaatccatcacttccggttttaatgagattccgatgtccgcgtaattttctttcgagatcgggatgaaatcatcatccgctttagacgtgtaatagctgatttcaagctttttgccgtttttttcacgtacaccgtctttgcccgttttccagcctgcttcatcgagaagctttttggctttttcagggttaaacgcgtaccgattgacatctttgtcatcataagcccacgaaaccggagacaccggcacattcgcgacttctccgtagcgtttaaagcggacatcgacgattttttgacggtcaagtccgtaaataagcgcctgggacactttcttatctcgaaaaggcggacgcttgtgattgacgtacacaagcccgtaatcattcacgacagatacgcttatattggcaaaaccgagactttttaaatgctgaaccgtatcatcatcaggtgagaaagaagcgtaatcaaggtcacccgtttcaaacagctgaagggaagttgacggatcgataattttataaatcagcttttccgttttcggttttcctgcataatagtgttcattagcctgatagcgtatttcctgtcccggaaggtattctgtaaattgataaggtcccgctccgagcggtttggcataaagctcttttaaatagtccagtttgccgaattgatatttcttcccgtagtaggcttctgacagcacctgccctcccaaaagaagcagcgacttcgcactgactttctcagtcgtgatttgaatggttctgtcatcaaggacgcgaatgccctctatcgtctttgcctttccttctttgtaagccttaccgcctttaatataggccgtggtgatatcttcatagcccgcgtatgcaggatcatgcagcagtgttaaagtgaatgcggcatcctttgcggtcagcggtgaaccgtcgctgaaaacgagattttttcttaaacggaacgtgtatgtaagctgatctttggaaattttccagctttccgcaagagccggggcaggcttccccgttttatccagtttgactaacggttcaaaaataggatctgtcgcatttccgtcccagccgttttcgtaaaagtacggcagaaacacaccgcccggcgcggaaatcccagcaacaaaagtgtcagttctggctttcgatttagcgggaatcgccgccggatgagaagctttaaattcctttgtcttgacatgggcaatacgtgtttcttcctttttatccgccgcagatgacggttcttctccggcactcccgaacgcgcaccctgataacatgatggataccgacagcgcgagtaccgttgtttttatcctccattttctctccttcatctttatcgaacccccgcatgcttttcatctatctttatataaatctgctccatctgttcctcatttctcataatctcccgtttgtttttctctacaagcagttcgaaattcaatgtgtgttttctgtacttttttcgttttttgctctttttgcgcacatgtgataccttttttaacgccacttttcatccctccgcttttcatttcattcaatgactttcacgcaaaaaaggcccttatctgtttaaaagataagagccttcggtgatccgatcagccatcgtttggaaatatgtaatgattatgttaattcacacaatccctacctgtcaactataatttaaaatatcgtttccttccgggggttttcctcatacactctctcatttttccgcatatgctagaaaacatagcagattacaagtgaaagtgagtgagaatgtggaaaagacaacattgaccggtcgcatcgtcaaaaaagatgacccggactataatgctgcgagaaccaatatcaatttaagcctgcaaagatatccagacatcattgtgttttgtcaaaacaaacatgacgccctcaatgcggtgagatgggcgcgtgagaacaatgtgcctttccgtatcagaggcggaagacacagctacgaaaacttttctctgttaaatgacggactagtcattgatctcagtgaaatgaagaaaataagagtaaatgaggataagcggctggtctcgattgaagcgggagccgaattgggggaagtctaccggacactctggcggtacggcttgacccttcctgcgggaaccattgcgaatgtgggaatcacggggctgacgctcgggggaggaatcggatatttaacaagaactgccggacttacttgcgatcgtctcctccagctcgagatgatcatagcggacgaaaaagcgggtgctgacttgatcacagtcaaccgttcaaagcactctgatctattttgggcgtctcagggaggagggggaggcaacttcggcattgtcacatccatgatgtttaaagccgtgccgatctcgtgcgtgtctgttttttctgtcacttggggctgggatgatttcgaggaagtatttaatacgtggcagcgctgggctccatttacagacaaccggcttacctcatcaattcagttttggcctaaggaagtaaaccgcatagaagcgctcggtcaatttaccgggacaaaggatgagctgaaagaactgctggctccgttaatgaaagcgggaaaaccagcaagcggcatggtcaagacagtgccatttattaaagcggcagccttttttaacagcccgggaggcaatcagccgcaaaagatgaagcggtcaggatcctttattgaaaaaccattatcaacacgcgcaatttccactttaaagcgctatttagagcacgctccgaacgaaaacgccagtgtctggcagcagtctctcggcggggcggccggacggatcgctccggaccaaacggcattctactatcgcaacgcaatcattgcccaagaatatattacaacttggacatctgctgaagaagaaagacaaaatgtccgctggatcgaaggactgagaacgtccctatcaagagaaacgatgggagattacgtgaattggcctgatagagaaatcagaaactggctgcaaacgtattacggagaaaatgttcaccgcctccgtcaagtcaaaacgaaatacgatccggaaaatatattccgctttgaacagagcatttcgccgcttcgccgttcaccgtttttctaaaaaagatgaagatgggcaaactccatcctcatcttttcttttattgatataagcggcttcccttctctgcaaactcttttgctttttctttcagtccttcgttgacggcctcgtcttcagtaagtccgttttccttcgcataatcacgaatatcctgagaaattctcatactgcagaacttcggaccgcacatcgaacagaagtgagccgtttttgcgccttcagccggcagcgtttcatcatgatattccattgctctttcaggatcaagcgacaaatgaaattgatcacgccaccggaattcaaaccgcgccttagacagagcatcgtcacggatctgtgcacccggatgccctttagcaaggtctgcggcatgtgccgcgattttgtacgtgatgacaccttctcttacatcatcacgattcggcagccccaaatgctccttcggcgtgacatagcaaagcatcgccgtcccgtaccagccgatcatcgccgcgccgattgctgaagtaatgtggtcataacccggagcgatatccgtcgttaatggcccgagcgtgtaaaaaggcgcctctttacaaatttccagctgcttgtccatgttttccttaattttatgcatcggcacatgacccggtccttcgatcatcacttgcacatcgtgcttccacgcaatctccgtcaattctccgagagtctccaattccgcaaactgcgcttcatcattggcatccgcaatcgaaccggggcgaagcccgtcaccaagagaaaaagcgatatcataggtcttcatgatttcacaaatttcttcaaaatgcgtgtacagaaagctttcctgatgatgagccaggcaccattgcgccataatcgcccccccgcgggatacgattcccgtcgtgcgtttagccgttaacgggacgtaacgaagcagtacgccggcatggatggtgaaataatccacgccctgctccgcctgctcaatcaatgtgtcacgataaatgtcccacgttaaatcctcggcaatgccatttactttttcaagcgcctgataaatcggcaccgtccccacaggcacgggacagttgcggataatccattcacgcgtcgtatgaatgtcttttcccgtggataagtccatcatcgtatcggcgccccagcgaatcgcccacgtcattttttcgacttcttcttcgatagaagatgtaacagccgagttgccgatattggcattaattttcacatgaaaattccggccgataatcatcggctcgctttccgggtggttgacgttagaaggaataatcgcccggccgctggctacctcgtctctgacaaattcgggagacacatgctcacgtattgcgataaactccatttcaggcgtaatgatgccttttctcgcataatgcaattgtgttacatttttccccggcttggcccgaagcggtttccgctgtaggccggggtattcagcggcacggccctcttttttataaccgttgtcttcaggtctcacggtccggccgttatattcttctacatctccgcgcccggtaatccactttgtgcggagcgcccccagcccttcatgaatatcaatctgtacatctgggtctgtatacggcccgctcgtatcataaacacggaccggcgcattctcctcttccccgaatgcccccgtagtcgcactcaggctgatttcccgcatcggcactcgtatatcgggcgaagaaccttctgcataaacctttttactgccggaaaaactcgacataatggaaatgttcgcttgctgtactgattgattttgcatacaaatctctcctttatcatttgaataacagaaccaagttcagcaccagcacaaaaaaaccgggttcaaagaagaacccggttttgcagtcagaaagaaactattattgttttcatcaacaataataaaacctttacttccccacgctggtacgaaccagatcaggtccaaagggttaagaagccgccgcttctctctcagcccgctcagacgggcacccccagtaactattgatttcgctctcatcgtaacataagttgtgtacaaaaaaaagcatattatcaaaattcagataacggtacggtcataagctctgtttcccgaacgcctttttcggtattaaaaacccgataaccctttgcggtttccctggaagagacagcccggaacagctgaccgtctttataatgaagcgcagcgccgtcatcagcggcatagccctccctgagtttcttttctgaaatcagacggtgatacaccggccggcgctccgcttctccgtcatagtgcggacaaaagcttcccggcaaaaatcctaaagctcttaactctctcaaatctccagccgaatccgtcaatccttcttcataccagcaaatcgccccggcgctgagacccgccaacatgatgccgttttcccaagcctcacgaagaataaggtcaagcccccactctttccataagacaagcatattgcgcgtatttccgccgccgacatatataatatctttcttcatgagaaaggatctgagatcagaacccggcggtttaaacagcgacaagtgatccggctcacaccgcagcttttgaaaggcctgataaaacctgccgatataattctccgaatctccgcttgccgtcggcaaaaaacaaattttcggctttgaccgcgccgactgctctaaaatatactgatccagcacaagataatccggctccatggaaaagcccccgccgcccattgcaataatctgcttcaatgtcatcacctcttttttcctctagtataacagctcataaaaaggcgttatccccatttcggataccgcctttaaaaagtatttgttatctaaaaaatgaaaacgcaccgtataacacaacggagatccccgcggcgataagcgccggaacaagcttcgaacgggcatacttcacaacatcgatccccaacaccgtacaggttgtcaccgtattatcactgagaggagaagcaaacgctccaaatgttccgctcgcaaacacggccccgatcgctaataataagctggtatgtgactgaaccgccagcgttacgccgagcggcattaaaagcccccaagtcccccaagatgacccgataaaataggatataacagcccccagtataaaaagagacggcgcaataaacatatgagggatccatgacgttaaatgagaagtaacatattccgagaatcccagatcttcagatactgctgttacggcccaaatcagcgataacataataataacgttgaccaattcgtttccgcccttaataaaatgggtaacaagctcgcctgcatgaaaacgctgaaacataaaaagagcaaatgctgcaataaccgctgccaataatgcggttaacatgacgccaagcatatcgcttttgataaaagcattcaaaaacccttgtgcttttgaatggccgtcccaccagctgagaaagagtgttaatagcaaaaacagcccgatcggaatgattaaattccaaggccgaatcggtgtttccttaatataagcacggtgcgccgaatccagctcctcctgctggtcagcatgctcattactttcgaacattcccgtatgttcaccgtgaatatctgagatcgtccctgtttccatgttaaatgaacctgagctttttgaaagcaacacaccgctgttccgcggaatcggttccgtatttttgttatgtttgcgagcagaagtttgtccgctcttttctgttttttctaagctttcgcccgctttttgtttcttaaaaaagcagtaataaattccgactactataatcacaatggagaaaaaattgaagggaatacttttcacatacaccgtgtaagccggctgatctattcctgacgttttaagggcctgtccgataatggaaaccatgtagccgacaaatgccgttgctatcggaatcaaggcaatgacagggtttgccgtaaactcaatggcatacgcaattttctgtttcgacaggtccagacgcttgcttaaagctttcatgatcggtgcaattgtgacgatgcgaaagtccggttcactgaacgtgccaaatgtcgacagccatgcaagcagcatcgcaccttttttggttttaacttttttactgatcaaatggacgaatccttttatcccgccggtcagctttataatccctacaaggccggcaaatgaatatagaaacacaatgattctaatattattggtgacgacaatgttgctgattacatattgaaccatatgttcaatcccgccaagcaagctgggatgcaaaagatagcttccgaccagcaaaccgacaaacagaccggactgcacttgctttgtaatgattgaaatgggaatgaccagaataaatgggataagacaagtccaagtcccttccataaaaaacacctctttcaaagaacttcttgttagtatctttgaaaaaagcgtatttatacaatctgcacgcgtatcatgttttcacaagccttggaggatattttcacacaacaaaaaaggcttctacatattgtagaagcctttgtataccggtggccggggtcgaaccggcactccagaaggaacacgattttgagtcgtgcgcgtctgccaattccgccacaccggcatgtaattcgtcgtgttcaaccgacgtatataaatataacatgtatttcataaaacgtcaacggttttagcaaagttttttaaatggtaatgcagtatatacgatacaagcaagaaacttatattgatagtcattacgtttttattatataaaaaaagtgatctgcaatatgcaaatcactctcatatatgttttataatgtgaaaactgatgaccaatttaacatagttcgttcaaagttaaattggtgccgagggccggacttgaaccggcacggtagtcacctaccgcaggattttaagtcctgtgtgtctgccaattccaccaccccggcaatagaaaggcgacacccggattcgaaccggggataaaggttttgcagacctctgccttaccacttggctatgccgccgtaatttggagcggaagacgggattcgaacccgcgacccccaccttggcaaggtgatgttctaccactgaactacttccgcaacatgtaaaagaacttaatacatcttatgctgttgtttttaaaaaaatgcaactgggctagctggattcgaaccaacgcatgacggagtcaaagtccgttgccttaccgcttggctatagcccaatgataatatggggcgattgatgggaatcgaacccacgagtgccagagccacaatctggtgcgttaaccacttcgccacaaccgccataatctgaagatgaataaataatatagtggcaggggcagtaggaatcgaacccacaccggaggttttggagacctctgttctaccgttaaactatgcccctatttataaaatggtggaggggggcagattcgaactgccgaaccctgagggagcggatttacagtccgccgcgtttagccacttcgctacccctccatcatttagagtgccggccagaggacttgaacccccaacctactgattacaagtcagttgctctaccaattgagctagaccggcaaatggtggctcgggacggaatcgaaccgccgacacacggattttcagtccgttgctctaccaactgagctaccgagcctttttataaatggcggtccggacgggactcgaacccgcgacctcctgcgtgacaggcaggcattctaaccaactgaactaccggaccatttttttggttgcgggggcaggatttgaacctgcgaccttcgggttatgagcccgacgagctaccgaactgctccaccccgcgatgataatggtggaggatgacgggctcgaaccgccgaccctctgcttgtaaggcagatgctctcccagctgagctaatcctccatcatataagtgacccgtacgggattcgaacccgtgttaccgccgtgaaagggcggtgtcttaaccgcttgaccaacgggccctggtattttttcgtttgttatgtattgataattagtggcggagagcaagggattcgaacccttgagacggggttaccgcctacacgatttccaatcgtgctccttcggccactcggacagctctccataaatggctccgcaggtaggattcgaacctacgaccgatcggttaacagccgatagctctaccactgagctactgcggaatgaagtctgcctggcgatgtcctactctcacagggggaaacccccgactaccatcggcgctgaagagcttaacttccgtgttcggcatgggaacgggtgtgacctcttcgccatcatcaccagacattttagtgacatgtattattatactatgtatttcagaaaaagcaagagtttttttaaaaaattctctcaaaactagataacagtaagcatacattcaaattggttaagtcctcgatcgattagtatctgtcagctccatgtgtcgccacacttccacctcagacctatcaacctgatcatctttcagggatcttacttccttgcggaatgggaaatctcatcttgaggggggcttcatgcttagatgctttcagcacttatcccgtccgcacatagctacccagcgatgcccttggcagaacaactggtacaccagcggtgcgtccatcccggtcctctcgtactaaggacagctcctctcaaatttcctgcgcccgcgacggatagggaccgaactgtctcacgacgttctgaacccagctcgcgtaccgctttaatgggcgaacagcccaacccttgggaccgactacagccccaggatgcgatgagccgacatcgaggtgccaaacctccccgtcgatgtggactcttgggggagataagcctgttatccccggggtagcttttatccgttgagcgatggcccttccatgcggaaccaccggatcactaagcccgactttcgtccctgctcgacttgtaggtctcgcagtcaagctcccttgtgcctttacactctgcgaatgatttccaaccattctgagggaacctttgggcgcctccgttaccttttaggaggcgaccgccccagtcaaactgcccacctgacactgtctccccgcccgataagggcggcgggttagaaggtcaatacagccagggtagtatcccaccgatgcctccaccgaagctggcgctccggtttccaaggctcctacctatcctgtacaagctgtaccaacattcaatatcaggctgcagtaaagctccacggggtctttccgtcctgtcgcgggtaacctgcatcttcacaggtactataatttcaccgagtctctcgttgagacagtgcccagatcgttgcgcctttcgtgcgggtcggaacttacccgacaaggaatttcgctaccttaggaccgttatagttacggccgccgtttactggggcttcaattcgcaccttcgcttacgctaagcgctcctcttaaccttccagcaccgggcaggcgtcagcccctatacttcgccttacggcttcgcagagacctgtgtttttgctaaacagtcgcctgggcctattcactgcggctctctcgggcttgcaccctaacagagcaccccttctcccgaagttacggggtcattttgccgagttccttaacgagagttctctcgatcaccttaggattctctcctcgcctacctgtgtcggtttgcggtacgggcacctctcacctcgctagaggcttttcttggcagtgtggaatcaggaacttcgctactataattcgctcgccatcacagctcagccttcacgggaaacggatttgcctatttcccagcctaactgcttggacgcggatatccaataccgcgcttaccctatcctcctgcgtccccccattgctcaaatggtgaggaggtggtacaggaatatcaacctgttatccatcgcctacgcctttcggcctcggcttaggtcccgactaaccctgagcggacgagccttcctcaggaaaccttaggcattcggtggaggggattctcacccctctttcgctactcataccggcattctcacttctaagcgctccacaagtccttccggtcttgcttcacagcccttagaacgctctcctaccactgttcgtagaacagtccgcagcttcggtgatacgtttagccccggtacattttcggcgcagagtcactcgaccagtgagctattacgcactctttaaatggtggctgcttctaagccaacatcctggttgtctaagcaactccacatccttttccacttaacgtatactttgggaccttagctggcggtctgggctgtttccctttcgactacggatcttatcactcgcagtctgactcccaaggataagtcatcggcattcggagtttgactgaattcggtaacccggtaggggcccctagtccaatcagtgctctacctccgagactcttaccttgaggctagccctaaagctatttcggagagaaccagctatctccaggttcgattggcatttcacccctacccacacctcatccccgcacttttcaacgtgcgtgggttcgggcctccattcagtgttacctgaacttcaccctggacatgggtagatcacctggtttcgggtctacgaccacgtactcaattcgccctattcagactcgctttcgctgcggctccgcatcttctgcttaaccttgcacgggatcgtaactcgccggttcattctacaaaaggcacgccatcacccgttaacgggctctgactacttgtaggcacacggtttcaggatctctttcactccccttccggggtgcttttcacctttccctcacggtactggttcactatcggtcactagggagtatttagccttgggagatggtcctcccggattccgacggaatttcacgtgttccgccgtactcaggatccactcaggagagaacgaagttttgactacagggctgttacctcctatggcgggcctttccagacctcttcatctacctcgttcctttgtaactccgtacagagtgtcctacaaccccaagaggcaagcctcttggtttgggctggtcccgtttcgctcgccgctactcagggaatcgcatttgctttctcttcctccgggtacttagatgtttcagttccccgggtctgccttctcatatcctatgtattcagatatggataccactccattacgagtggtgggtttccccattcggaaatctccggatcaaagcttgcttacagctccccgaagcatatcggtgttcgtcccgtccttcatcggctcctagtgccaaggcatccaccgtgcgccctttctaacttaaccgttaaaaagaatcactacgtgatatcttgcattactaattgaatgtgaattacttctgttatctagttttcaaagaacaacgcataggacatgctaacacatgcgttgccacaggaagtggcgcatttagcaggtgttcctatgttttgaaggaatgatccttcaaaactaaacaagacagggaacgttctgtttataagacccaaggtcttatattccgttaaaatccttagaaaggaggtgatccagccgcaccttccgatacggctaccttgttacgacttcaccccaatcatctgtcccaccttcggcggctggctcctaaaaggttacctcaccgacttcgggtgttacaaactctcgtggtgtgacgggcggtgtgtacaaggcccgggaacgtattcaccgcggcatgctgatccgcgattactagcgattccagcttcacgcagtcgagttgcagactgcgatccgaactgagaacagatttgtgggattggcttaacctcgcggtttcgctgccctttgttctgtccattgtagcacgtgtgtagcccaggtcataaggggcatgatgatttgacgtcatccccaccttcctccggtttgtcaccggcagtcaccttagagtgcccaactgaatgctggcaactaagatcaagggttgcgctcgttgcgggacttaacccaacatctcacgacacgagctgacgacaaccatgcaccacctgtcactctgcccccgaaggggacgtcctatctctaggattgtcagaggatgtcaagacctggtaaggttcttcgcgttgcttcgaattaaaccacatgctccaccgcttgtgcgggcccccgtcaattcctttgagtttcagtcttgcgaccgtactccccaggcggagtgcttaatgcgttagctgcagcactaaggggcggaaaccccctaacacttagcactcatcgtttacggcgtggactaccagggtatctaatcctgttcgctccccacgctttcgctcctcagcgtcagttacagaccagagagtcgccttcgccactggtgttcctccacatctctacgcatttcaccgctacacgtggaattccactctcctcttctgcactcaagttccccagtttccaatgaccctccccggttgagccgggggctttcacatcagacttaagaaaccgcctgcgagccctttacgcccaataattccggacaacgcttgccacctacgtattaccgcggctgctggcacgtagttagccgtggctttctggttaggtaccgtcaaggtgccgccctatttgaacggcacttgttcttccctaacaacagagctttacgatccgaaaaccttcatcactcacgcggcgttgctccgtcagactttcgtccattgcggaagattccctactgctgcctcccgtaggagtctgggccgtgtctcagtcccagtgtggccgatcaccctctcaggtcggctacgcatcgtcgccttggtgagccgttacctcaccaactagctaatgcgccgcgggtccatctgtaagtggtagccgaagccaccttttatgtctgaaccatgcggttcagacaaccatccggtattagccccggtttcccggagttatcccagtcttacaggcaggttacccacgtgttactcacccgtccgccgctaacatcagggagcaagctcccatctgtccgctcgacttgcatgtattaggcacgccgccagcgttcgtcctgagccaggatcaaactctccgataaagtagtttgactgactacgcacatcgctgtgcgatttatttaaaactttgaattaacaggtacgttttgtcttgtttagttttcaaagatcatttcaacctcatctcgaggcgactttttcagtataacatttcagcgagttgctgtcaaatgtttttttgtttttatttctccgccgctgtgagctttttgttgaagcgcatcagcgacgtttaataatataccatgcctatgattcagcgtcaacactttttttgaaagaatatcctcgatgatatacttcctgccctttggtctctatttgagatacttcaacaaagcctttttccgtcaggtaatcaagcatgacaccaagatcttgggtgaagtgcaccagttcagggtgctgaagcaattctccaaactgccacatttctttttctttcatcacttgaaaaaggtgcgcagaaccgatttcagcttttgaatggatgagaaaatcatttgctaagaataataattcgagtcttttctccaaactttcgtgactctcgacaagttcggaatatagcttatatacctgcggctcaatgtgacggacctggttccagactgtcgtttcgggataaaacccccggtcaatcacttctatgcgggccaagtggtgaagagcatgcactaccgcataatatgcatccagaaaatgatcagcttcaaaaaacgcttttccttctacaaatcttctgatcagcttgccgtattccattccgatctttaatttccgctcggcgaaaggaaaagtgctgagccggtcattgagttcagatatatattcattgcggtcaaacagcactttgccgttgatgatccaatctatgactcttctattggtcccaagcagaatccattcctgaagcagagcatccgttacaatatgtaaagaagcggttttttgttcgaattcataatgctttataaaaagaggttcatcagcctgtttgacaatgacaagcatgaccgcatcaaagttatccgtgatggatgatgctttactccttctctcaatcataaggacggccagcgtatcgggatgacttgctctttcttggtaaattggacggagaagattgtccattacgattcctccaatgcgattgtttcactagctattgtttctacatttctatgataaaacatgaaagtccttttttctaaacacattgcactattataacaaatttcctttcaggttccatatttattcttcccttttcttacgaaaacatgaagaatatgccatctgttttgtgctatagttaaacgagagggggatggacatggcgaaatactcaagcaaaattaataagatcagaacgtttgcgttaagtttggttttcgttgggtttatcattatgtacatcgggctgttctttaagcagtctgttttgcttgccagcttgtttatgattctcggcctgctgtcgatcgggctcagcaccgccgtttatttttggatcggcatgctgtccacaaaagcggtccgggtgatgtgccccgcttgcgagaaagaaacgaagattctgggcagagtggatatgtgcatgcattgcagagagccgcttacattggataaaggattggaaggcaaagcgttcgatgagtcttataacagaaaaaacagtgtaaaataaacgaagctgaccgtatcaaagcggtcagcttcgtttagtggttttcttttttggaacattcttggcagacgccgtaaatctccaaacggtggtggcttaccttaaaccccgtgacgtgagccgcaagctgttccacttcgtcaagcccgggataatggaagtctacgatttttccgcagctttcacaaatggcgtgataatggtcagaggtgacaaagtcaaatctgctggacgcatctccgtacgtcagttcctttacaagccccgcttcccggaatacacgcaaattgttatacactgtcgcaacactcatattagggaatttcccttccaaggctttatatatatcgtccgctgtcggatgtgccatagaatccacgagatattccagaatggcatgacgttgaggagtaatccggactcccgtatccttcaacgtgtctaaggcttcttttaattcatgtgcagccatccgtcatgcacctctcttctaaaaaagattcttactttataatgtttataattagtgtacatctttttccggtctcctgtcaaatgtaatctgaagaaaaccccgtgagttcagcatttgtccattaattagacgcaatttgttccaattctcgaagcgcctcggcaacgtgatctttcacttttacctttctccactccttcacaagacggccttctttatctaacaaaaaagtggatcgctcgatacccatatattctttcccaaaattctttttcagcttccacacatcaaaagcttccgccaatttgtgctcatcatcaacgaggagctggaaaggaagatcgtgtttttgcttaaatttttcatgtttatcacggctgtcagggcttactccgataataaccgcatcaagtcccgcgaaactttcgtgctgatcacggaaatcacatgcttccgtcgtgcatccgggtgtcatgtctttcggataaaaatagagaacgacgtacttccctttaaaatccgtcaatgctacttcttccccgctgtcattcactaatttcatatccggtgctgtttgtccgatttcaatcgtcatttcttatacctccgggttttttattaagcgtatccaattcacgttaagattacaaccgttatccttccgctcttttctggaagcatgaaccgttgtgctcgcaatgaagcatgctacaatagaacatgatgtaaggagatattaggagggtcattttttgtatacaaaatcagttgaacttcataaggaagcgttagagcatatcgtcggaggcgtgaacagcccgtccagatcctataaagcggtaggcggcggttcacccgttgcgatggaaaaagcgaacggcgcttatttctgggatgtagacgggaatcagtatatcgattatttagcggcttacggcccgattattaccggacatgcccatccgcatattactgaagcgattaaaacagcggctgaaaacggcgtgctgtacgggacgccgaccaaacatgaggtcactttcgccaaaatgctgaaggaggccattccttcacttgataaagtacgattcgtaaactcaggcactgaagcggtaatgacaacgatccgggttgcacgcgcttatacaggccggacaaaaatcattaaattcgccggctgctatcacggccattctgatctcgtacttgtcgctgcgggttccggtccgtctacgctcggcactcctgattccgccggcgtgccgaaaagcatcgccaatgaggtgattaccgttcctttcaatgatattgaaagctacaaagccgcgctggataagtggggttcagaaattgcagcggttctcgtcgagccgatcgtcggcaacttcggcatcgttgaacctgaagaaggatttttagaacaggtaaatgaattgacccataaagcgggcgcgctcgtcatttatgatgaagtgatcacggcgttccgttttatgtacggaggcgcgcaggatcttcttcaagtgaagcctgatttaacggcgctcggtaaaattatcgggggcggcttgccgatcggcgcttacggaggcaaaaaagagatcatggagcaggttgctccgctcggcccggcatatcaagccggcacaatggccggaaacccggcatctatcctatcaggcatcgcctgcctggaagtgctgaaggaagaaggcgtttatgagcggcttgatgagctcggcgccagacttgagcacggcattctcgcccatgcggagacacacggcattaccatcaccgtcaaccgtttaaaaggcgcgctcacggtttacttcactgatgaaaagatcgtcaattacgagcaggcggaaaatacggacggagaagcattcgccaagttcttcaagctgatgcttgagcgcggcatcaatctcgctccatcgaagtatgaagcttggtttatcacaaccgcacatactgaagaggatatcgacgccactttacaagccgttgaagatgcgttcagacatatgaaaaaataactgctgaaacaagcgggagcccggggcttccgctttttctttttgtccgatttgtgagataatggttttttcaaaaaaagaccttgaataatcggtatgatccctgtatattactttattgtttagcaaatcagccgacagggaaatgtaagtgtcagccgttcgttcggcacataatttattagagaaaggaatgcacgcacaaaccaatgaaacttggtgcccgcatttttaaaacagggattgcgattacgctcgcgctctacttagcatcatggatcggacttccgtcgccgatctttgccgggattgcagccatatttgccatacagccctctatttacaggtcttttcttatcattattgatcaggttcaggcaaatatcatcggcgctgtcattgctacggcattcggactgattttcggaccgagtccgattatgatcggattgaccgcagtgattgtcatcacgatcatgttaaaactgaaaattgaacacaccatttcgattgcgctcgtgacggttatcgcaattttagaaacaccgggaaacagcttcctgacgttcgctctgatacgaacaagcaccgttattttaggcgtgctgtcttcttttattgtgaaccttgtgtttcttccgccgaaatacgaaacgaagctgactcatcatacggttgaatataccgatgagatcatgaaatggatcaggctgacgatgcgtcagtccacggaacactcgatattgaaagaggatattgagaagctgaaggaaaagatgatgaagcttgatcatacgtaccttctttataaagaggagagaagctactttaagaaaacgacgtatgtaaagtcgcgcaagcttgtattgttcagacaggcgattattacggcgaatcgggcgcttgatacgctgaaaaagctgcaccgctatgaaaacgaaatttatcatatgccggaggaatttcaggagacgctgacagaagaaattgattatctgcttcattggcatgaaaggattctgatgcggacggtcggcaagatcaaaccgcatgatgacgatgctgaagaaagcataagatataaacagcttttgacgaagtctttcttgaaaaatcagcagaactgcgaggatgaactgcttgattacaatatgctcagcattatggctgcggttgcggaataccgcgagcagctggagcatctcgatacattaattacgagttttcagacataccacccgaaagacagcgaattagaaacagacgatgatgagtaacccggtgctctagataaccgggtttttttgcattaaaaaaaacgtatgccgcccattcggacggcatacgtttttgtatcagttcaaattctgaatcgtaaataagtgtctgtactggccgccttgggccattaattcctcgtgcgtgccggtttcgacgacagcgccgttttccatgacgacaattttatccgcgtgcgtaatcgtggacagcctgtgggcgacgataaatgtcgtccggtttttcgcaagcttttccatcgcttcctgaatgtagtgttcactttccagatcaagagccgatgtcgcttcatccaagattaacagcggcggattttttaagaatacacgcgcgatggaaatccgctgtttctgcccgcctgacaatttgacgccccgttcgccgactttggtttcatagccttcggggaaattcataataaattcatgggcatttgccgctttcgcagccgcaaccacctcatccagagacgctcccggtttaccgatggcgatattttcacgaatcgtctcactgaacagaaacgtatcctgaagcaccattccgacttgattgcggaggcttctcgcttcataatcgcgaatatctgtgccgtcaatcagcaggctgccgccggatacatcataaaaacgcggtatgaggctgacaagcgtcgatttaccgccgccgctcatcccgacgagcgcgacggtttccccttttgtcacctttaaggaaacgtcctgcaaaatcgtttcttttccttcctcataacggaacgagacatttcggaattcaacttcgcccttaatgccgtcagcttttactgcattcggtttatcagtcagttcatacggctcgtcgataaattcaaatatgcggtccattgaagcgatcgactgggtcagcgtcgtcgatgagttgatcaatcttctgaccggattgtacattctgtcaatatagccgacgaacgcaaccatcgtccctaccgtcagcggaccgtttatgacaaaataacccgcaaacgcgataacgagcagcggcgccaaatccgtaatggtattcacgactgcaaacgtttttgcgttccaattcgtatgacggatcgctctgtccagaaaatgtccgtttttttcatcaaaattggcttgttcataatcttcaatggcaaaacttctgatgacgggcatcccctgaactcgttcgtgcaaatgtccctgaacttgggcgagtgcctgagaacgctcccgtgtcagttttcggagacggccgtaaaagtatttcactgaaattccgtataacggaaacaaaatgacagatatcaatgtcagcttgacatcgagtgtaaacataatgcagatgacgatcagcaccgtcatcatatcaagccagatattcatcagtcccgttatgacaaagtcttttgtctgttcgacatcatttatcacccgggaaatgacttcgcccgttctcgtgttggcataaaacctcaggctcaatttttgaatatgatcaaacaatactcccctgatatcatagagcacccggctgcccgtccattgcgcgaagtattgccgatagtactctaccgggggacgcagaattaaaaacagcacgaacatgatgcccattatcgtgaatagcgatgatgttttagcgcttgccgttccgctcccttgaataatgtcatcgaccacgtattttaacagaagcgggagagccagcgggatggagaattttatgatgccgattaacactgtgattaaaatttgttttttataaggttttacaaattgcatatagcgtctgattacgcccacactttatccccctctctctttaaggcgtgtgagcccatgtgaaaaacctgttgacaccccaacaggttttttattgtattctttattttgtatagcgcagataccgttcataccacatatcaacaaattccggagcaaacggtcctttccgctgatgaatccagtgcagcagcgtattcagatactccttcagaatgctgtcgatctctttagggtaattcattgatttgcggtggtcatcgtattcatcctcgtcaagaatgttatacgtcatatccggaaacaccttgacatccaaatcgtaatcaatatatttgatggcctctccgtcataagcgaacggcgagctgatgttgcaataatagtgtaccccgtcatctctcagcattccgatgacgttaaaccactgacgggcatgaaagtagcagatcgccggttctctcgtcacccacgtccgtccgtcggattccgtcaccattgtccggtcgttggctccgatgatacacaattccgtactttttaaaatcgtcgtttcattccaaattcgatgaagcagcccgttatgcttatagctgtgaatttgaatggtttctccttccttgggatatcccatatttctcccctactttctgtaaagccctgcagtcaatgcagccgcaattgctttccgacaagtcttttcactattataacgttacgaattaaaaaatgaaaataaaagaaccactccgcttccggaatggcacattcatttctgcacataggaagacggcttttccgtgctgcgataagactggatgacttgctctgtctgcctttggaataactcctgtatgccggccaggtcttttcgctttgtcgcaatttcgtcctgtacattgtccagctttgcatctctttccagactgatgagttccgcttccacctgccggcagcggtcaagttctgactgcaactcgagaagctgatccatgattttcatctgttcacttacaagcttttcaaactctgacatcgggttcctccttaggcttttaggttgatactccttaccatttcgattttacgccggaaaaccctttgactcattctgtagaggaatcacaagttttgtcgttttggcaacagaaaaaagcacttccatccgaagatgaagtgctttttcgtttcagtgattagctgttttgctgtttgttttgttcagcagattggttttgctttctaacctgctgcgcatcagtttcactgccgaattcagtgccgtattgaccctgaccggaagctgattgctggttttgtcttttcacctgctgaacgtctgttttgctgtattttgagtttgccattgttatcacctccacgcactttagaatgcgcaggagacgataaggctattcatctttttttaaaacttatacgagcagagaacgtccgccgtcaataatgatggtctggccgcggatcatgtccgcttttgaagaaactaaaaactccaccgtatcgatcatatctttaatttcgaccattctgccggccggcgtattttggcgggcatcttccagcagttcatctctgttagggaaatgcttcagcgcgtccgtatcaatcgctccgcctgacaccgcgtttacgatgatatttttcgaagacagctcaaccgccagataacgggttaacgattctaaagcggcttttgagactccgaccgtcgtatagttttcaagatagcggatgctgccgagcgagctgatgctgacgatgtggccgcctccgtttttctccatcatctttgccgcttcctgggcgcagaaaagcaatgctttcgcattgatattcatcgtccagtcccagtgtgtttcttcgagttccatgaccggtctcagcacgcctgaagccgcattattgacgaacacgtccagtctgccgaatgtttcgtcaatctggcggaacatgtctttgatttttgccggctggccgacattggctttaatgacgagcgttttaacgccgagtttttcaatttcttcggcggtttctaatgccgcttttttactgcgggcgtaattgatgacgatgttgtatcctttttccgcgagtctgatggcggctgctttcccgacgcctcggctgcttcccgtgatcagtgcgcatttattttgttccatttttcctcagctccttgctgtgtatagttcttttcattcaacaaacaataaaagcaatatgtgttgaaaggggtcttttatatgtatgtcggacgtgatatgggcgaattggccatgatgcccaaaaaagattggagagattcagagctcgcctatttccatcatgccttccagcaaattatgccgtatttaaacgaagaaggccagtccaaataccgggaactgattcaggaaatcgaagcccgcggcggactgaaacggaatgaagcggattacggccacggcactcgcgtcagctatgactgacgctttttacaggcggccgctttcttccgccattttccatatcttttgatgggaaacgggaaatgcgtattcctcgagctcctcttttgtgacccgtatgaattccgttgtatccgacacttgttttactttaccgaaaaagaccgaaatattccagacgagatgggtgaaaacatgttctacgataccttccagctccccgatttcagcggttgttcccatctctttttctaaataggcttcaagctgctctctttcggttttgattcctttctgggtttcggtattcggaaactcccacaagttggcgagcaagccttttggcggccgtttatgaatatagacatcgtcttgatcgtctgtcagcacaacggctgccattgtttttattccgggctttttctttttgcttttaacgggcagctcccgctctgtcccttccgcaaatgccgagcagtgcttttgtacggggcaaagcaggcaggacggcgatttcggggtgcagatgatcgcgccgagctccattaaaccctgattgaattcagatggtttttcatgagaaatgaaagcggataccgcctgttcgaaaatggttctggttttaggttttgcgatatcgtcccatatggaaagaattctcgacatgacacgcatcacattgccgtctacggcggggatcggtttgttgtatgcgatgctgagcacggcgccttttgtataagggccgacgcctttcagtccgccaaattccttttcctcggcagggacgactcccccgtaccgctcatgcacttcttttacggcactttgcagatttcttacacgggagtaataacccagcccttcccaggctttgagcactttttcctcatcggcttcagcgagcgccgaaacggtcggaaattgctcaacaaaccgccggaaataagggataacggtttctacgcgcgtctgctgcagcatcacctctgacacccacacccgatacgggtcctgattttctctccacggcagaattctctgttctctttcgaaccatgtaattaagtcctcgcgaaatttgtctatatctttttgtttcattttttcttcaagtgcgttcatatcttctcctcagatgtttcgggttccgcttttcttgacaccgtattttggtgtaaacttagggcacgttacgataatatgttacattaaatagtgataaagaaaaagcggaaacatatgagaacggcggataaacgccatgattgggcaaacagaaaatggggaatatcttataatgcgaaatatgcgggcgactgattgttaacgcctgctaggaggtcaacaatggatactggcactcacgttgtcatgggtatcgcgcttggcggaatcgcaactcttgatcctgccgtcggcatgcacacccccatgtctcaggcagttatgatcgccgctcttgccggctctcaggcacctgatattgataccatattgaagctgaaaaataatgccgtttatattcgaaatcatagagggttcacgcactccattcccgccgttttattttggtccgttctgattccgggtattttgtttatgttttatccggaagcgaactttttgcacctgtggctgtggacgcttctcgctgtcgttttgcatgtgtttgttgacatttttaacgcgtacggcacgcaggccatccgcccgttttcgagaaaatggatcgctctcggtttaatcaatacctttgatccgtttattttcgtcagccatttggccgcgattgccgtgtggtatatcggaggtcatccgggcgtgacatttctgatgctttatatcatcctcacaggatattacgccgtccggtttttgatgcagctgcggataaagcgaaggctgcgcgaaatgattgaagaggagattgaaaccatcattatttcgccgacgatgaaattcaggcagtggcgtatcgccgtgacgacggcgcatgccttttatgtcggcagaagccttgacggccatgtcgtgatattggatacattcaaccgcgtgcccgttcctgaaaccgatgtaatgaaggccgcaaaacaggacgaaaatattgcagcctttctttcattttcccccgtttacaggtgggaggtcgatacctttaaagatcattatgaggtgcgttttattgatttacgctaccggagcaaaggccactatccttttgtcgccatcgtccacctcagtcatgatttagagcttctctcttcttacacgggctggattttcagcgaggaaaaattgcagaaaaaattaaaactcggctctgtttaagagccgggctttttttgtcttctcacatatatagccgcaaacacgaggctgatcaccgatagagcggccgcgggtttaaaaaacggcgggtaatacgttaattgaatatcgttttttcctttttgcgctttaaatccgatgaaggaataatccgcttttttaatctgctctttcctgccgtttatcttcagctcccagcctttttcatatggaatcggaagcatgatatacggcgcgcgggttttgttatcatacgagatatgaagcgtatttccgcgccagctgagatcggcccgcagttctttttccgcttttcggtatgcgcttttcagcgtatcgtattgttcttcataaagcgccagtctgtcaagctgatacgatcctttcggcagacggatttggatgttttttgttttcggcactctgacagtaagatcgttgacacctgttttgtaaatggattgattcgattttctcgttgtcgtgtaatcgttcacttttaatgtaaagccctggtccttcgctttattcttcaaataaaagctgacgtaataatcgccgccgtccatcttagcggcttgcggcgtaatgatcaggccgccgccgtcttcgtttaccgtcaggatgccgttatgataatcgccatgttcggccgctacctctgcatggcggatcatatttttcgcctcagtcgcttttttcgtgttggttgtgcttgattccatgacgatcccgtcaagcattgcccgttccctggcaagggcgggcgcttttttcaggccgccctcgttatacacgcgatcggctgtccgtacgaacggaagcatatattgattttgataaaccgcataatgggttgattccatgatttttttgaacccgtacggcacgccggcctcgtttgttttttccgtcatataatattttccgtaaagcaggctgtataaattagccctgtttcctaatgtcgcatagcggctgacgctttctctgcccatgtcaatctggaggtcgtgccagtaaaaggacagcagattgcggttcagtatacttgagtatacgctgaatccgttgaacccgtatatgatcggggtgttattgaaaacaccgttcatccaatctaaacgggcaaacggatcagggtctttttctttcaggcgctgaatgagctctgattgctctttgcctttatagtcagcacccgtcataaatgtatgcgataccgtataaatcttcccgccttctgataaagcatatttttcatatgtattagccgtaagcaccgccgtaagcaaaatgacggcatagacggcgggcaccgcgcctttcagtcttgtctttgctgcaaagaaagcggctatgctcagcaccagaagaaggatgacgggcaggttggcgtgatcagaaatatccagactgtaccgcctcacctggctccaatagagcagaacgacgagtacggcggacatcagcatactcttcatgctgatgtctgaaagcttagaaagcccggctgaaaccgttccggcaatcgtgaagcacaggacgtattcaaacctgttctgcggagctgaaaaaccgttaaaggcacttgccgcgaacggactgaagtgaaacagaatatacagcagactgattcccgcaaacagccggaacaagcggtttttgtataaagtaaatgtaaatagaaaaagcaaaaaagccgccggcaggatgattatccggctagaaaataaaatgttgtcggaaaaatcaagccatgcaatatgctctgaatacggaggccgcagattatgaaggtatccgtatacgacaggaataaaggaaactgcgcttatgccgaacccgagaaggcccgacagaataaatatcctgcattgagtgagcctttccgcctcattgccttcaagggggatcacccacctgaataagatataaacgccgatgaaaatcagattaatatacgcaaaataaaagttgttgatcaatgtcagcgcacaggcgaagataaaccacgccggctttttttcccggatgattttttccgcgcccaacacaagcaacggcagccacaccatactgtcagtgaaaaagtcccaatatacctcatgccggaagtagataatcgagaccccgtacaacacggcgcccgcaaaagcaggcaccgtccgtttgacgaaataacggaacacacacgccgctgtgaatatgatcaaactctgcttggcgatgctgataaaaacggaggcctgcgcccaaaacagcgcatcagcctcacccgtcagctgaataagctgcaaaaagcggacagcggcggagataaacaggaatagaaaagaagtagagaaataatagccgagctgactgtacacgcccccgcccagtccgaacgaatagctgtaaaacagcctgccgttcatatattgatcaaacagcagctttttgaagaccgccatttgggcgatcccgtctccagaccccgtcatatagcggccttgcgaccactcttttaagaaaaaaatatgagcggctgccgcagccagcacacaggctgccggcaagatccatttgttttttttcatacaacgtccccagaccctgcgcacagcggcgcctgtttaatggttccacttgcgcttttttgtataattcgtttcattttgttctccgtacgttatattcgcttctttaattaaatagtgcgggcgtttttttgtttcatagtaaatccggccgatgtattctccgatgatgccgagactcaaaagctggatgccccctaaaaacagcacggcggaaataatggtgaagtatccgggtacggacacgccgtgtgtcagaatatgaacaaaggtcgttacaatataaaccatcgacaaaagcaatatcagaataccggtgaaaaagcataccctaaggggcttgttgttgaaggagacgacaccgtccattccgtagttgaacagattgctgaatgaccatttggacgtgccgttcttcctttcgacattttcataaaatacgattttctggtcaaacccgatccagcagaacagccctttcgagaaacggtttccttcactcagcttcaaaagggcatcaacggcctgccggctcagcaggcggaaatctccgaccccgtcacgcaggtccacttcgacggctttgttgataaatttataatacagggaagaaagcacggaacgcacggggctgtccccttttcggttgcgctgcgcgatgacttggtcatacccttcttcatagccttgaatgaagtctttcagcagatgggtcggatgctgcagatcggcgtccatcacgattaccgcttcgccctgcacgtgttcaaatcctgccaaaatggccgcttctttcccgaagttgcgggaaaaagatatgtatttgacgcgatggtttctggcggccagttctttaatctgctgaagggtgtcatccgcgcttccgtcattgatgtagaaaatttcatagtcataatgaatcgtctgaaactctttttttaaagattcatggatgagcttgacgttgttcccttcattgtaagacggaataataattgagattaacctttgtttcatgaaggcaccttctttgtattattctttttttaggacggccttaaaggaattgtccgcaaaacttcagtaaggcttttcctttttttaatgacgtttaaaccctttttttgttacagggaaagaaaattttttctgcatatgatttatattttgtcatgtttttcggcagatatgagaaaaaaaagaaaaagtctgtacgcgggacagactttattgctgaaggtattcatgaatcaaatggctgacaatgcgcggtttttcgtgaatgacccaatgtgaggcatcatctatgaagattaagtcgccgtttggaatcatccgttttgtttccttggcgagctttttgctcagcgctcggtcattgacgccccatattaatcggtacggaacgggcattttaagcggaacggcagggcctaaaccgccggctctgatcgcccggtaccagttcagcatcgccgtgagcgctccttttctgccccaagcttctttgtagctgtcgacatcttcccgtgaaaaaagcgccgggcgttcagataagccgatcgcgtgatccaatacgcggtaatcgtcttcagacaatctccgttccggcttttccggaagctgaaagaacgcgatataagagcttttcttccactgcggcgggtagaacggtgtgaccttccgcataaccgccgggtgcgggatattgaccgtgatcaatttttcaacgtattgcggccgcgtggatgccaaatgccaggccacggctcctccccaatcgtggccgatgacgacggctttgtcatctgtaaaatgagtgatcagcccgataatgtcgtctctgagcgtatcaatggtatagttttcaatgccctccggtttgtcactgagattatagccgcgctgatcaggcacgacaacatggtatccggcatccgccagcggtttgatctggctcttccagccgtaccagaattccggaaacccgtgcagcagcaccgccaaaggaccgtctttcggaccggttgaagccgtgtgcagcgtcactccgtttgtttcgatcatgtgaaacgtaatgtcattcatcgattctcctccccgtttgtttcaatcttctttctgttaagacgatgatcagtacgctgatcgcaatcaataatacggcctgaacgatcagggcgaacggctgagtcagccggataagcaggctgcccgcaaatccagctgccgccgatataaggccgaacaaaatcatgagaagcgcactgaatcgattgccttctttccactgcgactcatccgccatagagcgcttcgtccgatatccgtacaggctgttgatcgacttcggcggaaaaaatgtgactaaaatgccggccgcagccatcagaaggccgccgatcaccattatcatatccctcactctccttttcatcttttacgaaaggaaaggcggaaggtttcagaaaaaaagcaggctcattcgcctgcctgaatctttatttttgagttaagtcggccgttttcacataacctgctttcccgccgtatgtgacgtacgcccatttacggtcaaaccctccgtcatggctgaacccccagccgagcacattgacggtttcacccgctttaacggacccttttttgccggtttccaaagtcggcgtataaaaagcggtttgtttcgcggtcaccgccttcaccggctgcttcatcagaaaatgcgtggaaatataggctttgtgccctttgtagtcaatctcagcccaatctgctccttgaagccgtttaacctttacggaatcctctgaacgaagcgtgccgataatcgacccttgtttatttggttctttgcggacgttaagttctcctgctttcacgatatatgtatctgctgcggtgtctatttttgtctgctgaactgctgcggcattcgctgccggatcaaaaaaaacggtgcctgcggctaaaaataagcaaagtcctgcggccggaataaatgcggttaacccctttttcatgttcattgtggttcctccccgctattttataagttattacacatttccacattccgccggtcgccaaacatgatttttctatttcttttataaaaagtaaaaaccgccggacgatatccggcgggcgaactgctatgttaatgcaggagacccctgctttgatccaaataatgagaaacgtcttcccgaacgctctggaacatatggagcttgctgccgtatgattcgatccattccttgacgacgcgttccgtcatttgctctccttgatacgggcggccggcttttgcgtaagtcgcttcgaaatctccccataaaagctcaacccaagttcgcgcttgcaaatagctgagcatgtcatttttctcaagcagcaaattcgtcagtttgtcgatatatgtattcatctctctgtctcctttccttgggaaaacctgctgcttttacgcagcttgtcacaggcatatactaactttacgtcttcagtccagaaggcgcaaccttttgatattggccgagggggaaaacaaatggtccggaacaaggcaaaaggatttcctaatcagaacaataataagtttgaaggcgaaccgcgggcaaaggatgactacgcttctaaacgggcggacggttcaattaattcgcacccgcaagaacgcatgagagcttcaggcagacgataacacacacaccgtaagagaccgggaatgacccggtcttttttttgcggaaaaaaacatccttttgcggtcataacgctaaataaattccataatatgttaaatgttaaaacgaaagccggtagacaaaaaaggaggggttttataaaatgaagacagtttcaaaacgattgctgagccttaccgcattcttactgtcagtttcattatttgctgtttcagctgaagcagcgggcagcccgcagacatctgtatcaaacagcggtgaggagtttgacgcacatcagaatcagcctgtacaaacaacacagacatcccccgcttatgaaggaacgggcctcatcaaaagacagcttgcacaaaacagcaaagctgacatcaagtcattaaagccttccagtattattgggacagacgaacgaatcagaatttctcctacaacatcatttccatatcgagcgacagcacagctgaccgttacatacagcggcagcacaagcacctacggatgcaccggtttttttgtcaatgccgacacgatcgttacggcgggacattgcgtgtatgaccagaaaaacggctgggcatcaaaaattacggcagctcccggccgcaacggatcatcgtacccgtacggctcttattcaggcaagacattctacagtgtcaaagggtggacagaaaacggtgacacaaactacgactacggcgcaatcaaagtaaacgggtcgcccgggaatactgtcggctggtacggctaccggacgaccaacagttccagtccggccgggctttcctcaaccgtgacaggatatccgtgcgacaaagtgtccggttccatgtggtcagacagcaagccgattcgttctgccgagacatataaactcacttatacgacagatacgttcggctgccagagcggatcgcccgtttaccgcaattacagcgacaccggccagaccgccattgccattcatacaaacggcgggtcgtcttacaatctgggaacaagggtgacaaacagtgtattcgacaacattcaatattggtcaaatcaataaagcttttgttttctttctcgcggcggccgttttatgcggatgcggcaaagcggatgattccgccgccaaaaaagcattgcccgttacgctccatgttgaggatgcagaaggctcaccggcggccggtgtgacggtcaccgtgatgaaagcggcggagtcagatcatcagccgaatatagaccgcggagagataataggcaagactgatcaccacggcgagattgcatggaaaagcggcgcgaaaggaacctatgccgtcgtttttgaaaaagacggagtaccggaaacccggaatatttccttagctgagagtgataaacatacggtgatcagcattacattgaaacactgaaaaaagcttgcaggcggaatatcccctgcaagctttttgttatcctttatgcacttggtattcatagacatctttcttctcagacagatgagcgaacgtggaaagcacaaggccgagagccgtcatcagcgcaccgccggcaaacagccatgagtaagatcccgttcccccgagaatcaatccgccgatccaggcgccgagcgcgtttgccaggttaaaggcggaaacgctcaccgcagcggcgattgtcgtgccgttttctgaggaagaaataaccttggtctgcaaaagcggcggcgtgccgaacgcacatgcgccgaataaaaatgtcgctgaaaccgcggcggcgggaaaaacagcgatataagggaaaatcgccaagacgccgatcaagccgatcatcacaccgatcatcgtgcgtgtcagcagtttgagcggcactttccccgcgaagaaattccccgccactccgccgagaccgtaggcaaataatgcgcctgtgatgccgactgtgccgaaccccgctgaatctcttaaaatcggctcaataaacgtgtaagcgataaatacgcctgagtagccgagaatggtgatcgcaaaggaaaaaatcacttgcttatgcttaaagacactccattcattcatcagcatcggaatcactttcggtttccggttcggtacgaccagcatcagtccgatcagcccgatcatgcctaaaacggaaataatgaaaaagacggcccgccagttaagggcatctcctaaataagagccgaacgggacaccgagcatcagcgccacggttaatccgccgttcatggaagccgcggcggcggaacgtttttcaggcggcaccatttcactcgcaaacaccatggcgatcgcaaaaaaagctccgtggatggatgcggataaaattctggaaatcgccagcacggcgaagtttggcgcaaagacgctcatcaggttggcaaggacgaagatgcccattaaccctagcaacaccggctttcttggcagcttaaccgcgataatggttacgatcgggcccgtcaggcagacgctcgccgcgtacgccgtaacaagcatgcccgctgaagatacatgtatatgaaagtcatcggcaatcgacgtcagaatacccatgacagcatattccgtatacccgatggaaaatgtgcaaatcattaacacaaaaatcattaatttcacagatggctgtttcattttgatattcaacgcaaatcgcctcctttttatttaaaaaacaacgaattccatcttaaaagatatcaaaaatgaattcaatcattttttactgaaagtatgaaacgaatgtgcccgaaaagaaaaagaggccggaaccggcctcttttgttattttttttcttttaaaacggaaatcggcagtgcttcttccccgtcagacggggaagatctgtgtccccaggcgaatacgccgttgatgtaatcaatgcggaaagtgtcatcagaaccttctatctgatacaccccgccgggccgaaagtcttccgggttcagcatgtaagctttggccatcgtaattttccgttcaagcacggccagttcatttacaatgcccatctgttccgcttttcgcgctttttccgtcagtcccgcaatttctgtctgtagttcatgaggcgtcatttgactgtatcgtttgtccatttcagtttactcctcttcctgcaagaattgatcaatatcgtcaatcgagaatccttttctgaataagtactgtttgaccttcattccgctttcataactgccgtcatagcggtatttcctgatcgctttttccgcatgagccttcagagcttccatctcggcttcatcatcattttcatactccgtctgttccagagcggcattgatgacgtcgaaagggaaaccttttcgctgaagctgcatctgcgcccgctgtctgatctcttttgtggacagctttttgtcttttttcaggattttgccgatatgtttcagcgcttcttgtatctgctcatcaaatgtaaacgcactgagcgtctccttgatggtatcgtcgtctattcctttcgctttcagctcgcggaacaggacgtcagggcctttgccgtttgtttttttgtgggtgctcgcataggcttcggcaaattctttgtcatttaagtagctgtaatcgtacagtttatggatgacttcagaaatgaccatgtccggtgtttcttttttcttcagatgatcccggacttctttttcagagcgcatccggtatgataaaaattctacggcgcggttaaaggcttttttcacgtcatcgccgtactggatttcaagaatgtcaagctcgtccagttctttcccttttttcaggtcaaaacgcacaagcacgtcggcgtcgacgctgaatgcatatttctcatcaagaaagatgttgaagcgctcggtatttttcttttgggtcgatatttttgtaataaacggcatcccggtctcctttcccgccccgatgttcaggcgtttttctttttggcaaatgaggtacagtatatgtatcaacgtgtaaggagagatggatatgaatatcgcgatgacaggcggcactggttttctgggccggcatctgacaggtgtgtttacccgccggggacatcatgtctatattttatcaagaaaacagagagaaaccgaacaaaaaaatgtgacatatgttcaatggctggccgaaaacgcggcgcctgagcgcgagcttccccctattgatgtatgggtgaacctcgccggcaaatccatctttgaccgctggacggacacaacgaaggaacaaatcatctcaagcagaatagaagcgacgagagaagtcagacggattatgaagcagcagccgaaaaaaccccgggctttaattcaggcaagcgccgtcggcatttacggcacaagcacagaaaaaacgttcaccgaacagtcagatacgtcaaatgaagattttctcagtcatacggctcatatgtgggaacgtgaaggccagaaaattgaagcgctcggcatccggacggtatatgccagatttggggtgatgctcggtgaaaaaggcgccctgccgctcatggttctcccttataagctgttagccggaggcaccgtcggctctggacggcaatggctgtcatgggttcatgtcgatgacgccgcggaacttattgcttttgcggcggagcatgatgacttgtccggtcccatgaatgtgacatcgccgaaccccgtagaaatgaagcaattcggaaagacgatcgcaagtgtcctgcaccgcccccattggattcccgtaccggaattttttctggagaaggccttgggagaaatgagcctgctgatcgtaaaaggccagcgcgccctgcctaagcaggcgctgacatccggttttcaatttacgtatgaagaacttgatttggctttaaaggatctcttatctgcataaaaacggaaataaaagccaatcctattggtattctgttttgaaggagggtcttcttttatggaaaagaagcgtgaaaaacatcagcagggagccaatctgaaaaaaatgcaggaagtcctttattccggtgaattcaaaaaagcggaaagagcagccaaacggaaataaactgaataaagatcgggaccgggcagatactatgtttgtttgatatcacttttttcagggggcgattgatatgggcagaaatcatactcacaaaaaccgtgataaaaacaaacaaaaacttcctcaagttccggatgctttgaaacacgaaacagacggcacgtacgaggaatattcaagcgagcttgctgattccgctgaccgcgaagcgcaggcgcggatgaaagccgctgacaacagagctaaaagcaaaacccgttaatacgaaatccccgcctctgtatagagacggggattttttttacagttcggtaaacaggctttttgccggcgtccgttctttcgccttaggctgttcatccggatagcccgtttgaatgatggcggcaaagcgctcattgtcagcaaggccgaagtcttggtgcacctgtttgtcatacataatgcggccgcttttccagaccatgccgatgccgttttcatgtgcgagaagctgaaggttttgaatcatgccgctcagcgccgcgaaatcatcgtttctcgtaaattcattttcatcttcttttaagacgaccagcaaaaatcccggaacggcgctgagattttttctcatgttccgctctttttcctcgttgaaatcatcttttatctttttgaaaaatgagacgtagctgtccgcaagctttgcttttcccgcttcgcttgctgcgtagataaaacgccatggctccgtcagtctgtggttcggtgcgtaaacggccgtttcaagcatatctaatatgacttcagaaggtacggtttccggtttaaacgaccggatggatcttctgtttctgattgtatgtgcaagactttcgttttgctgtaattgttcggttttcggcatgccgattcaccttcctatccaaatgaaaatgattatcatttataatataacggatacgaccggcatttgtaaaccgttacggaagctgaaaattgattgtttcggcatacacggccgttcccgtcatcttgatgttcatctctccgttttcctccgcgatcctgatttccacttttccgtctttcccgatttcctggccttgttcaatcgtaaggcattcggcttcggagcctccgtattgccgcatataggctgccatgacgcctgaagcggttcccgtgacgggatcttcggtcgttccggagaaaggggaagaaaaatggcgtccgtgcagatcactttccggatgaacggtttccagagaaaacggatgaacgctcgctttcggaagatcgcgcaaaatagcgggaaattgtgcgttgtccggcaccatattccgtgatgctttaagtgatctcagcggaacaatcagtgtccagatccccgttgatccgtaaacaatcggcagcccgctgtgaaaatcctcagccgtaatcccgagcgaggcggcaagcttttctttgtcgcccgtaaacggcagaaattgcgggggagcctgttcgagtgtgatgtatacccggccgtttcgttcagcggcttttgcgggaagaatgccggcttttgtttcaatttgatatgtctgatcagcctgaagccttcccttttcaattaatgcgtaaagagaggcgacggtagcatgtccgcataaattcatttcgtggccgggtgtaaaatagcggatgcgcagatcggcttctccgcttttacagagaaatgaggtttcattgtaccctgccatttcggcgatcatctgcatctcttcatctgaataatcatctccgttaaagacgattcccgcgggatttcccaaatcaggaatattggaaaacgcttcatatttaaacacggttgcctgtttcattcatcagccttcctttcaccttatgatcatgttattcagtataacagagtgaaattagaatttttagttaattcttcgaaaaaaaagacgccttttaacggcgtctttttttggtttttccgatcaggcgggtgacgagaatcatcgtgacggacagcgatctgtttttgcggtacgccaagtatttcccgcgccactccggtttgtatttttctttaaaggcccgcagcccgctgaagctgtacatataccggacgttgttgaagatgacggccgcgattctttccgaccagaaagatgtaaaagccgttcctacgtttgacaaaggcgccatgcccatattgaaggtggtatagcctttttcctgcgcccagagaaacagacggatgaaaagcgcgtccataataccgttcggcgcgcttttccgataacgcatcaagtcgacggatatctcgccttcctgatacatcggcatcaggttggcaaaagcgatgatctccccttccgcgtctttcacgtaagcaatcggcgcctgttccaaataatcccggtcgaagaaaccgagagaaaaacctttctcttttttcggtccgagccattcgtccgaaatgtctttcagcttggcgataaactcggaggaaaacggcggttccccgacatgaaatgtgtagccttcgcggtcaaatttgttgttaatcgcccgcagccccgcttttttcttacctgagagcgtaaaggcctccatatccacgaacgcttcttctccaagcttgaagaagttatagccgaagtcatgatacagcgccagatcttcacgttcgatctgataaaacatgacactcagcccctgcttatgcgcttcattcagaaattcttcaatcacaagcggaaaagagtctctctgtcctgacggatcaccgagcacgacaagccttctggaaatctggctgaacaataaaagcgctttgccgtcgcttgagaaataaaaccgcttatccccgagaaagccgagatggctgagtgcgtttccgccttcttccgccaaaaaggacttcagccgttcaggatcggccttttctccgatcggcttcgatcttttatgataaaagaacgtaaacaaaaggaaaaacagcggcacaacaataatggccgtcatcgtggcatatgtaatgtgcgaattgttatggacgaaataatcgtggcgcagcagccgattcattttatcccaaataaagccggcaatgagattgtagttaaacaaggcgataataaacagagcggccgcaaaaatcatctggccgagcgtatacgaagcctgctctctgataaactgccgctttaacagcacaagcaatacgatgacgacaggcagaataaagatcgcgctgatgttcaatccttttaagaaactgaacacaaaaccgccgaccagcgcggcaaccgccattgaataagaacgtttcgtccgtttgtataattcaatcggcaagattaaaagaatcaaagccgcgcttaacgataacgcgttaaacgcaaggagcgccgggcgcggaatatgcgggatgaccgtctccctgtcaatcggcagggcgacggacgccagcacgaccactcccgccatgaaaaccaaaagcgacagcgaaccgtaaagcaccctgattaagatagcgcgctggaatacgagaagcacgttcgtcgtttccacggcgggcgccatcttcggatttgattccagccgtttaagcgtattttccgttaaatcgccagccgcaaagaacagcccgaacacaaacggaataaatgaatacacaatccggtagatgacgatggatgtcacaaccgcctcctgcggaaagcccatattctgcatgccgagcagaaacagaaggtcaaacgaaccgaatcctcccggcacaagactgatgattcccccgatagcggcaatggcaaatacaccgaatacatggcggacatccgcgtgaattcccatgacatacaaggaataatacatgacgacagccgccgcaaaccattcagcaaacgatgccccgatgtaagaaaaaaccggatgcctcggttttgcttcaccgtcttctgcgccagcttttttattgttgatcccagcggcgattaaggctgccggcacaataagcgccactccggcgataacagcccacagccacggtttctcacctgtaatctctccaaccggcagaacgcgggcgatggtcaggatactgaagacggacagcccgagcagcgctgaggacgtaagccaggcgatgcctgcgacgaggcgttttacgtcattcgtatgttctttgtaaagcatcgtccgcagcccgacacccgccagaccgccgaatccaaggacattgttaaaggaattggcgataaaagagaccctgaatactttccaattcggaatgttgaggcgaagcgtccgtttcagcacaaagtcataaaaggacattgcgctgacggcaagaaggccgagcagaacgagaataaataaatcgtaacgctcaatcccgttaataatgtacagcgttcgtttaaaagaaaggtctgtcaattcctttttggactgataaatgactaaaagcaaaactgcaataggaaataatacttttaatatcgataaggcattctttttagtcagcaatgttctctccaatcatcataaaatagcttatttattataattcccccaataatctccaacatattatacactaccacctcacattcaaacaaaactcgtctgcaactttctttctctgattaaaatcagtaatatggtatgcaggagtataaatgaggaagtgagacgatggattataatctgtatgatacaacagtattaagcggcgatattttttctcctgaggaacgggatatttgggtgctgtacatgaaagtgatgacatcggcggggctcggcgatgtgtcggagtggatgaagcttgatatgagcatgccgcaaatgaaagtgctgatgcttctgaacaaccacgggacgcttaaggtgagtgacatagcggagaaaatgggcgcttccctttcaaatacgacggggctgcttgaccgtttagaaaaatcaagtttcattacacgcgctccgtcagaagaagaccgccgttcagtcgtcgttcaattaacggaaaacgcgaaagatattttccgcagcctttatcaaaaaggacatgtaaaattgaagcgttcattggaaacactgaccgctgaagaaaaacaaacggtcaatcaagggcttgccattttggcaagagcgcttgattcttccaaacagggatagagatgaaaaaggcctgccggtatcggcggcctttttttgtttgacatttaattcacttgaagtgaataatatattcgaagtgaattaaaaacaggaggattgatcagtatgccggagccattgcaaacagaaaaaaaccagagccgggccatcactctctttacgatcggtgtgttcatggcggcgctggacaacggaattatttccgctgctctgacgacgattaacggctcttttgatgtttctccttcatggggatcgtggggagtgaccctttacacattgggactcagtgtcagtgtgccgattgtcggcaagctgtcggaccgatacgggcggaaaaagctgtttatgattgaagtcgggctgttcggactcggctctttgcttgtcgcactcagtcagagcttccccatgtttttggcggcacggctcattcaggcgcttggcggcggcggaatttttattatcgggagttcgcatgtgctggccgtgcttccgaaggagaaacaagggaaagctctcgggcttttaggggcgatgaacggtatggcggccgtcctcggaccgaatatcgggagctttttgcttgatgtaaccgggtcgtggcattggctgttcttgattaacctgccgattgccgccgctttggttgtgtgcggcggtttgtttatcgctgaaacgaaagagcctgaggcgaaacggcttgacctcgccggcacaatgctgctgtctcttgcgatcttatcttgtatgatcggtatcacgaatctcgatggggcgaagctgtcagaaagcataatggacgtaaaggtatacgggtatcttttgggagctgcacttctctttctggtgctgcttaaggtcgaaaagcgggttgaaaaccgagggggcgatccgattctcgcctactcgctgctgcaaaataaagtgtttcaatggacgctcgtcatcggatttttatcgggagggctgctcgctgcggtcatttttattccttcttatgcggagcaatatttgcacgtatcggcggagaaagcgggttattggatgacgccgctcgcgttggcgtcaggcatcggagcgtggctcggcggggcgatcacggataaaaaaggtccggtcttttccgcggttgtatcaggcgccatcgcatttgcaggcttcagcctgtttccgttatgggtgacggataaatgggaatttgtcacagcgagtgtcattgccgggatcggtttcggatttctgctcggggctccgctgaatgtgcttgtatcagaaacggcgggccaaaacaaaggaacagcgctcggcacgctgtcactcgtaaggcaggtcgggctgacgctcgctccggctttatatgccggcttcattacagcgggctttgaccggatcggagatgacatcaaaaaccgtttagcgaaaagcggcattcccgctgatcaggcgcaaacgccggatatcggcggcggactttcttcgttgcaggagcaagtgagccgaatccccgttcccgctgtcaaaaaagcggtttctgatgcgattgaagcgggcattgccagcggctaccaccatctttatacggcagccgccgtcatttcattatgcacgattgtatctgcggctgttttggcgtttttccgaaagccggcaccctctaagacagatgccagcccatcctccgggaaagctcagtaatatgagcgatgtgatgttcagagtgccagacatatagtccgagcgcttgttccagcgtaatcgtctctttagatacaggatggaagtatgtccgtttgaattgggcttccgtcatggagcgcaaaagagcggcccatcttctgtgcaggatcgttaacagctcaagcgcatccccgcaagcggcggttttggaatcatgaagagcggcccagcctttttcatcataaggacggatttccggttcattctccgttaagctcaatttaaaccgggtatagccgttcatgtggctgtccgccagatggtgaaccacttggcggacagtccatcccccttcgcggtactgcgtatcaagctgactgtccgacatcgctctgacagcttgtttcagtttggccggagcgtgttcgagcgtattgatccattcttgtttctgtccggccgaaatcgattcagccggctgatactctccaatcggatagctgaggatttgtttttccatttttgtctctctcccgttgatcgtattatgaaagtatgatggtgatgtcgcagccttccgctttcgcttcacgaaagacctgaagcacactctcggcgccattttctgtaagctgcttgctttgttcaaactgtctccattctaaaacgagggggtattccacccagccggtcagacaatcccataaagcgtcaaggttttcaccgtagtattcgggaagggcaagttcctttttcaatgtctggtgcaggtcgctcatacttctgatttgctccccattaataactgctttattcatgcgcggctcctttcccatgtttttattctatcagtttaccattttcctcttcagaagtgaccggagtctgccgcggttccagctggacaatgccttgcccgccgtcaacggccaccctgtcccccgttttcagttttgacgttgcatttccgcacccgacaacggcaggaattcccagttcccgggcaacgatcgccgcgtgggacaaaggggcgccgacgtccgttatgatagcagccgctcttggaaaaagcggggtccagcctacattggttgtcgaagtcactaaaatttcccccgccgcaaaagaatccccgtcttccggagcatcaaggacacggacaatgccctccactctcccggccgctcccgcgaaaccttttaaagtatgcgcatcatcagtttccgccggcataaaagcatcgtaataatccgctcttctgtcaggatcttcagcccatttaaacggattgaaccttccgttaataacggatgggaacggcggcagttttttataggtttcatagttttgctttctcgcttgaattgacgcaaccgccggctctttccccgcgagcagatcggttatttcatgcagatacaagaagaaaatatcgtccttcatgccggtcatttccgccgctctgagcgcgaatgctctggctgtccggtacaccctgacaaattcggatctggttgtctctctaatattcgcgtattctgacgctttttccattttggctttgagccatttgaccttatgaggaaacttttcttcaaatcttcggaaggcctgttcatgcgcccgctgctgtttcaaaagcagttgttcggcatcaatacccgactccttgtgttctttgatctgcttcgtcagccaatcccggttttctcccggatgcggtatggaaagttcgtattcatgcgggccacggtggccttggttcctgagatattcttcctcgctcatacggcctttcatgacttgatcaatgccgataatcggctccaggctggccagtccgccttttcccctcagattggacagcaggagattcgcatcttctatccctgcgagttttgttaattgagaggttaacgacgaagaggattgcgcagaatcacgcccgccggatattaacgcaaaccacgcgttgcataaatacggatagatctcattgttccatatcgctaataatgcccgctccgtttcggcccgtttcagcttttcctcaatattccggcaccactccggcgattcgtccaagtaggaggacatgttttttttcgcgagcttcattttcgacagatacggtttcagttttttcgagatgatcttcaaaagttcatactttgagaacggatataaaggaatcttcatttccgccgggatttctcccaatgtatcgctcatcatttttcctatttttccgcctttcggattcagaccgaaagcggcgagaacggaaagaggctggctcatattgttataggctcttccgcaaatattgccggaccagacataatagcccggaatgatgcccgactcttcatccagattccggaggagcgaccatgtcagcggcgtcatcacatcgggaatcgcttctcctatatttgtgtttgtccataaaaaatcaccgctgaaagaatcattccattcataggtttccagatttccggcctgtaaggtcgtaatcgggcgggattgaagaatatacaatgtctcgcccgcggcggcccattcaatatcctgcggccctccaagatctttttccagctttttcgccagtttatagagctttgacgcatatttgcgaaattccccggggccgtcatattttttcttgggccgtgccagtttaaaagaataggcatcggcttccccggaaacgagctgctccccgagaccgtagacgtaattgcctgtcatctcccgcctgctccccgtaatcggatctgcggtaaacagcactccggatatctcagacggtatcatcagctggatgacgattgcgatttcatgctcatcttccattccctgaacggcgctgtacgcttttaccctttctgactgtgccgatcggcggacttcatcaatcgccctggacatgtcttgatctgttttgacattcaacaccgtatcgaattctccggcaaaggaagcctgagctgaatcctcgctcagcgcggatgagcgtacggcaaacaacgcagatgcatggcggctgcggatggatttcacatattgatcaatagcctctctcgcctgatggcgcagctgtccgtcctgaaaggcagacggcaaaatcacaaacccttcaggcacaggatacccgctttgatacattttagagagaatgcttccttttcctcccgcaaaggaataaagttcgtccggaagttctccgaatgttttgacacagtcattcataatgtccccgctcctttttagtcgttcatccaagctcacagtttttctctttttcactttttttgaaagtatttcctataagtatacaatatatcggtcttcacaagggagaaaatcgatggcgttatgttgtcataaatgcatccgtcaaaacggccgcagcggggtcttcagccttacagtgaaagcgctattaaaattagagataggctgcccgatactgcttgcctggcattcgcttccggcttgccgcggggggtttcgtttgcaggttatgtcaacttccgtatcaaaaaggcggccgaaacgccgcctttttttcagactgtgcggccttgatgcgccgccgtatttcttttggtctgcttcggctgatacactttcccgacaaacaggtatccgtatctgaaatggttgcacacccaagataagaaaatgggaccgagcgtgcagatcaaaaataaaagaaggatggcagccgctaaaggcattgatcgcaaatagccttccagaagatatccgctgattaaaaagtaggagtgcagcagatagattgaaaacgaatagttgctgatcatcatcacaatcgcgggcacttttttgagctttgaaaacagatgaaaacacagaaagatcatactgaccgcgtaaatcataatatccggacgcttagaggaaatggagccgccgctgatatatgaaacggccacaatcaatattgccgatacggccgcactgaagtaaaccgcataacggtactgattgatgagcgataaaaaacgcggatattcctttccgcaataaaatgccagacagaaataaaacacccagcccggaaacggaacccaaaagaacggaaaaatagaatcaagccccgatgatgccggcggatgaaagatggaaaagtaagccagatagacggcgttgatgataaacgaaacagacagcacccacatgggagatgtgttgttcagccagcggtgcagcagcatatggagaatgtaaaattgaaagatcacaagaatgaagtagccgatgaagtttcctaaaaacacattctctaaaaatttaccgatcactgaaacgaagccggctccttcttccgccacgcttttcattaaaatggcatccaccgcggcaataaacagaaacggcacgaaaatgactttgccccttttctttaaaaaacccgcgggaacgcctcccgggtatgacctggcaagcagaaattccgaaataaagataaacgccggcgtgctgaacatcaacagggtccgaaaagcatcaaccgtatgggcggcactggctaaggactcttcctgaatcatcagcaccattgaaactacgtgaagcagaaccacacttaaacaggacaggcagcgaatcacgaaaatttcttttatctgcatgcggccgctcctttttcacaagcgcgccggactttagcgtatgcttggcgcagccatttttcccgcagctcgggtgtgctcgttttgacgacagaaaaaaggttccgctcggctttttgaatgccgcaaaattgcagaatgccttttttcagcgtaatccagtccgagtttttccgaaaccactttaagtaccagcccggggaatccgccgtataaaagacctgtgccgtctctgcccggagcagtccttttacgcggccgttttcatatgtgtaggcttctccggcgacaagcactctgtcaaaaaagcctttcataatcgccggaacgcctccccaccacagcgggtagatgaaaatgagatgatccgcttctttcatcagtttccggtatttcttcgtttcagcgtcccggttcatgtcagagcgctttttttcgccgccgtacttcagcacgggatcaaattggtcggcgtataagtcaatgaccgtatagctttggccgctatcctttaaagccatgacgacgtattttacgagagccgcattgaaactgttctcatccgggtttgcatacacaatcaccgtcttcatatgtccctccattatttcttaatttttacaatgattatatcatgttgtcatatgaatgaggcaaagacatgagaaaggctttttccagttctgctgccgtttcgataacccctttctgcatattttcgctgattttgccgccgcagattcaatgacaagcatccggcacttctgcgtttttgagcggccgtatggtatactagctgtcaaatgaatggcttggaggacaacatgagaattttaaagtacgcgattttagggcttttgcgaaaaggcgaattgagcggatatgatatatcgagctattttaaggaagagctcggccagttttggagcgcaaagcacagccagatttatccggaattaaaaaaactgacggctgagggatttattacgtttcgcactgcgattcaaggaacaaagcttgagaaaaaaatgtacacgctgactgacaggggagagctggagcttgctgcttggctgacgaaaaaagacccgattccggaaacggtgaaggatgaatttatgctgaaggcttatttcatctcagctttgacgcaggaagaagcggatgagctattcaccgaccagctcgtaaagcggaaggagaaattgtccgatctggaaaacagttatcaagaactgatgacatcgtccgcggaggcggattctttttcttctcctgatttcggccattatctcgtgctgacaaaagcgcttgagcgggaacggaattatatttcctggcttgaagatattttggctctcatcaaaaaagcataaacaaaacggggcggctctgtatctgcaagccgcctgtttacgttctgagaacttcattgataaacgaatcagccattaaaataagaaaaagcagactgaaatacacaatcgaataaaaaaacatccccttcgaccattgcgtgtcatccgccgcctgaaagcctttgacgctccggtacagccagatggccccgagcaggagagcggacgcggtataaaacgggctgacgtctatataaagaggaacgagcagcgaaaccgcagtcagaacggcaatatagcgcagcatttttatttttgtggcgcggttgccttttaaaatcggcaaaagcggaatgccggcggcacgatactcttcctttcgcctgattccgatcgcccagaaatgcggcggctgccacaaaaacataatcgcgtataacaaaatcgcgggcatatcaatgtacccggtgagcgcgcaataaccgattaaaggcggagccgccccgggaaaactgccgacaaatgtgctccagacggattgtcttttaaaccaaagcgtatacacgacggcatacagcaaaaaggcaagcaggccaagaacggcggtcagtacattaagcgaaacaagcatgatgaatccgcatgcgccgagacatgtgccgtacaggatcatgaccggcggcggtattctccccgtgacgctggcgcgggtgcgggttcgcgccatctttgcgtccatgccgcggtcaaaaaagttattaaaaacagtgcttgatgccatgactaacgccgttccgatcatggcaaccgccatggcggcaaatataccgggccctccgcccgtcctttctgactgaatccatgcgatccaaaatccgcccaatgcggcgagtgaatttgagatgataatccccggtttggcaagaatgataaagtctttgaccgtcatccggtttccgttatgcttcatcggctgttccgtctgtgctgcatttgagttcatttgttcaggttctcctttttcggcttatcatatcaggaagaatcagggagcacaatttattttggacatttttcacacaattgtaaattgtatatgaaaagccgcatcttgtgaccggatgcggcttttgcctttttctattcaaatcctgcccatacagctttttcaatccggcggatgccccgagctcgggccggcgatggcggctccacgcgtcatttttgcgcctcactgagatgttcgctctcttcagtcactcaaaagccgtgtggatattgcaaatcgacgttcttctttcccgagccttttcaagaaaacttcagaaaaataaaaaaccttgccgattagacggcaaggtttgtttcttacagtgtaaatgcgatatccgcccctgatacagggtctttgacgaatacgccctcttctttttcttcgatctcaaagccggcatcggtcagcgcttttgtcacacgtgacagctctttttgatgcggcagcgcggtggtgtaataatccagcccgcttgcatttcccggtttcggcggcgcatgttttccggcccatatattcagaccgatgtgatggtgataccctcccgctgaaacaaacagagcggacatgcccgcgtaattgccgacaatgtcaaaaccgagaatatcggtgtaaaacgctttggcttcctgtaaatccgtcacatgaagatggatgtgaccgattacggttccttctgggagacggcttttccgttcagctccggcttcttccaaaagcccgtccacatcgacgggcgccgtttgcatgacataattgccctctgcatcccggcgccacgtgctgcggggacgatcggcgtatatttcaataccgttgccgtccggatcagacaggtaaagagcctcactgaccgcgtgatccccctgaccgagcgcgatgccgttttcaatcagcctggccaatgcgatgccgagttctttccggtcaggcagaagtatcgcgaaatggtaaaggccggtgacagaccgctccggcagaacgacggcgcttggattttcttcaagcaccagcaggacgcgttttccgtctgctgacagtcttgctgaacgatctgtctgcgagatgacttgaaggccgattacattccggtaaaagccgagcgagcgttccatatttttaatggtcaatttgacataaccgattgccgtatcttgatgaatgccggtcatttgaacgccttctttcttatgctgaaaaagtttctcccttttttgatttgaaaaggagctgatccaatgaaagcagacggcttcctgaaagcgctaagtgaattgacgcaaccagtaagatgaaatcaaattcagatccgcccataaatggtgaggaaagcttcgccgtgaagatggcgccgactaatgtgacggcaaacagaacgccgataatgcgcgttgccaaaccgaaaaagatcagaaccccgccgacaagctcaatcgtcgcgatgacatagaccataaaggccggaatcccgatgctctggaaaaattgcgtagttccttccaacccttgaaacttggataaaccgtgaacaaaaaagataatacctgttacaacccttaaaagcagtgttcctgtttcgaatgatttattcataaaatcctccttgaaaattattatcacttactttatgtaagctagtatatatacataacttatttacgtcaagtaattttgttacatttaacgaaaataacttaaaagtactatttgccttcgcgaaaaaaagacctccgcactctgtcggaggtctttttccctatctatgattcccggaactggctttcatataattcccggtaaaacccgttctggcttagaagttcggcatgggttcctttttcagccatttcgccgtctttcagcacaagaatctgatcggctttttgaattgtgttcagcctgtgagcgatgatgacgcttgttctgcccgtcattaaacggccgagcgcttcttgtattttcacttccgtcactgtgtcaatgttgctcgtcgcttcatccaaaatgagcagcaccgggtccgccagcacagctctcgcgatggaaatgagctgtttttgtccttggctgatgcccgcgccgttttgggtaagaacggtatcatagcctttcgggagccgttcgatgaacccgtgggcattggcggcttttgcggcttcctccacctctttgtcagaagcatccagccggccgtagcggatattctccctgatggtgccctgaaagagaaaagaatcctgcaggacaaaccccatattttttctcagactggatctcgtcagttttttgatgtccgttccgtcaatgaggatttttccgttattcggctcgtaaaaacgggcgatcaggctcgtaacggttgttttacccgctccggtcggtccgacgaaggcgattgactgtcctttcggaacgctgaaggacaggtgttttaagatcgggctgtcttcctgatagccgaaggagacatctcggaattcaatctctcccgttttgatcggctggtacagcgcatgctcttcatcttcccgctcctctttttcatcaagcacgtcaaacacccgttcagccccggcgatggccgataacatcgtattgaactgattggctaaatcatttaaagggcgtgtgaactgccgcgagtattcggcgaatacgacgatggaaccgattgaaatccatcccttcagcgcaaacagcccgccgaccgccgctataatcgtaaagcttaaattgtttaaagagttcatgactttcggaatgaatcccgaaattgtctgcgcccaaaaccccgatgattgtaacgccgcgtttttttctaaaaattgttccatgacgcggtcttccctcgaataggctttaatgaccttcgcccctgatatcgactcttcaataaaaccgttcagctcgccgaggtttttctgctgctgcttaaacagcaaccccgtccggttggtgatccatttaatgctcaaaagcatgatcggaataatcaaaagggtgatcaatgttaaaagcggactcatgtacagcatgacggagattgtgccgacgaatgtaatgacgctcgacagcacttgaatgacggatgtatttaaagtggagctgacattttcgatatcattggtgacccggctcattaagtccccgagccgctgtttatcaaaaaacggaatcggcagctcatgcagatgggtaaacagctcgctccgcattttaaacacggtgctttgcgagatattgatcatccaatagttttgaaaccataaggacaatgattgcacgaggtaaatcccaaacaggatgaacagcacccccgccaatccgtctgtcgtctgtccgacgataaaatgatcaatcgctttcccgatgacgaacggtccgagcaggccgaatatggcgcttatgactaccatgatgatcacaagcgttaaaagcccttttttctcggctacataagaccagattctgcgcagcgtgccttttgtatcttttgctttcgcgcgttttctgccgccttcatttgatttgagcggtattttcggatatcggaaaggtttacgaatgtctttttgcattgtcagctccctcctttccgaattgtgattcataaatctgccggtacagatgagactgtgccatcagctctttgtgcgtgcctttggccagcagttcgccgtcttcaagcaataagatggtgtcagccttcattgcagtcgttattttctgcgtaataatcagtgtcgtgcattcataggatctgatcgcttgtaaaagcttcgcttccgtttgaagatcaagcgcgctcgtactgtcatctaacagcaggagggacggctttctgataaaagcgcgcgcgatggaaatccgctgcttctgcccgcctgacaaattgacgccccgctgtcccagcaccgtgtcgtatccgtttgacagcttcataatcgtgtcatggatttgcgcgtcttgggccgcttccattacttcatctagtgaagcatcctcccgcccccaggcgatattttcacggatggtgcccgaaaacagaagcacttcctgcggaacatagccgatttccctgcgcagcccgcaagcggagaattcaccgatcggtttgccgtctatgaaaatactgcccgaatcagccgtgtacaggcgcggaatcagctgaaaaagcgttgattttcctgaacctgtcgcgcccataatggcaaccgtttctttcgggctggcagaaaaggacacgtgatgcagcgcgtctttttccatgcccggatagcggaaggacacttcgcgaaactcaatcccgcctgcaagcgcccgtgccgggtcctgccccgttccctcgccgccttctgtttccagcacctcgccgattctttctccggaagccttcgcccgggaaaataccatgatgagaaaaggaaggacggacagcgcgcctgtaatccgcgtcgcatagttaatgacggaaacgacatcgccgacctgcgctccgccctgagcaatgcttttggcgccgaaccataagataaacaaaatgcaaatgttcatcagcagcattaaaatcggcatcgccgcttccacgagacgaaaagcggagaccgttttttccatcagcttcgtattcgatttcaaaaaacgtttcacttcgtggtttgcacggaggagcgctttaatcagtttgatcgccgtcaggttttcctgcatgatcgtgttgacctgatcaagccgcttttgcacagaccgaaacagcgcgccgcctcttttcagcacccacagcaaaaacaaaagcaaaatcggcaccgtgatcagcagaaaaaacccgagtttcgcattgacggtcagcgagagaataatgccccccgcgatcattaacggcgcacgaagcataaaccggagactcatgaaaagcatattttggacctgtgtcacatcgtttgtcagccgggtgataaacgatgtggatgagaattgcgcaaacgtcgaataagagaaggattgaattttttgaaaaagcccttttcgcgtatcatacgcatagctctggctgatgtgggcggagtagaatgaatttaaaatgcccgatgcgaatgaaacagcggtcagtccgatcatcacgccgccccacagccaaaccgtaccgagatcctgctttaaaattccttcgtcaatgattttcccgatcagcaggggctgtatcagctctaccgcaagctcgatgagcatgaaaaacagagcgattcccgccaaaagagaatacggttttacatatgataaagcctttgacatgtgtaagcctccaaatcctttgttcaatattattattttatgcctttccggcaaatgaataaagaaatttggtgtgccgttttttcaataatctgcgaaaaagataaaaccttcccgggaagggaaggttttgaccttattgatccaattgctgttcaatacgctcccgcatttgcggaacccctaatccgacaatgacctgaagcgccctgcctttcctgacgacgccgtgggctcccagctctctgaaatcggcgtcacttttgacctttgattcatcagcgacagtgacgcggagacgggtggcgcagttggtgacctccgtaatattgtcctttccgcccagcgcttcaatatacaaagcggctgtatcccgctgtgtttcgtctgccgccgctgtttcttttgaagcctgcttccgttctctgtactcctttttcgaatagagctttgtttcctgcccttcctctttttctctgcccggtgtggcgatgttgaatttgagaatgaggaaacggaagacgaaaaagtaaacagcggtaaaacacaatccgataatgatctggtatacatacgtcaagccgtggcttgacgccagcgggatccagttcaaggtcgcagcttcgatcaaaccgcctcccatatttccgacgacgccggccatatacatgacggttgccatggaagcggcaagcaaagcatgaaccgcaaataaaaacggagagataaaaaggaatgtaaattcaatcggctctgtaattcccgcgacaatggacgtcaaggtgaccgggatcaataggccggcgacgatttttttcttttcctttgaagccgtggcgtaaaaagcgagcgcgattcccggaatgccgaagattttcgagttgccgtgaagcgcgaagcccccctgcgggaacaattctttcagcggtttgacgctttgagagtattccccgagatgctgggcccaataggtgacgataccgccttcagccacagccggaccgtaaataaacggagagtaaataaaatgatgcaggccggtcggaattaaaatccgctccaggaacgtgtaaatccacacgccgatcgccccggaagaaacgagaaagctttgcagcgagcctattccggactgaaccatcggccacacgtatgccaccgcaagtgaaatcggtatcataatgaagaaagaaatgataacgatgtaggaagatccttgaaaaatccccagaaaatccggcagttttttatcaaaataacgattgtgcaaatacacgacaatagatgaaataaagatggcgccgataatattcgtatcaagcgttttgatcccggcgatcatcgtcagcccgctcgttccgcccgcttcctgagtcatatcgacatgaaaagccccgccccaaaccgtcagaatcgcattgataaagtaattgaatgtcagataaactgtaagcgcttccaaacaagcccgcgcctgcgcttttttcgctaaggcgacaggtatgccgatcgcaaacaggagcggcatttggttaaagacggtccagccgccctgttcaatgacgtaccagcattgataccaaagcccgtcaggatcagccaggggccccatcagcgttttatttttaaacagcgtactcagaccgacaataataccggaaaatgcaaataacaaaacaggcacaaacatcgcgctgccgaagcgctggactttttgcatcatttcacgtgacctcccgctatttatcaaaattttcaagctctttataatcaacatatgcacggaataacgcttcgcccaccagaaaaaacggggcgaatgcgacgatttccgttttatcgcttaacgtcaccggcttgctggtcgcataaagattatacggcgtcgtttgcgccagtacgttgtttttcagattggtgattgaaataaacggaactccctttgcggacagggtccttacctgcggaattaattcgggtgtttcgcctgataatgaaataatgatgaatacgtcatcaaccttaaaatcatcacacatgatattaaactctgtgatgtcctgaattaaaatcagatacttccgccgggatacaaacatccgctgcagctcacgggcgcacaccctctgagccgtccccgatccgtaaacgaaaatccgttttgcttcatctatcagccggcacatctccgtcatatcttttgacttcacgtattttacattggcttcaatatcatccagcagcttttcaaacgtcatattctcgccctcttcaggctgatcctcccatttcagaaaaacccggaattcactgtagccgctgaagcccagtttttgggcgagccgcaggatggaagaccgagagacattgcaggctttcgccatgtcattgataccgagatggtagcacgtatgtttatgattcaatatatattttaaaatataaaaatcgttgtcatttaatttcgcgtaatgctgattaaccagttcttcaagactcatcccaaaaatccccccgttttctttctattatatagaataacagataaagaaaacggggaagattgtcatcaggaaataggagacggacttacatcaagctcaggccagtagtccttgttagcctccatcagatcttcaagaatcagtcttgccacacgggcgttcggcactgtttttgacaggatcagcgcctgccacagcttttgaaatgaccgctcttcccacgcttcagccgtcagtttttcaacagacacctgctgttccatcaggcctttttgaaattgcggtatgttcccgactgagagcggttccggtccgtttgagcctacgagacaaggaatctcaaccatggctgacggatcaaagtttgcgatcgcgccgttattttcaacgattaacagcatcctctcccctgtgttgtaagcgatggcccgggcaaggtcgacgatataggaagcatgatcatcaattttaatttcactgttctccgacgattgttcgcgcgtaatcatatcgcattggctgaaaatgaaagcttcccgcccttccatgacttcgttggctctcgtatggttcgggtttgattttttcaccatatcatccgggaataagtaatattgcagatatgtgttcggaagcgtatccggatcagccgcctgtacgtcgcgcgcttttttgaatgtgtcattccagcttgcttcagtctgttcggcctccgtcttcggaacgtagccgtattcacggacatgctctttcagcttcggcattaaatcattgccatgccggtctgtgatggacgtccaccagccaaagtggttcaagccgtagtaacggacgttcatttctttccgtgaagataatccgaggatgttcgccatgcgatcctcaattccgaccggcatgtcgcagatgttcaatatttttgaattcggtctgaggcgccgtgtagcttcggccacaatcgccgccggattggagtaattcagcatccatgcgtcgggcgagtacgtttccatataatcaagaatctccagaacaccgccgatagagcgcatgccgtatgcgattccgcccggcccgcatgtttcctggccgaccacgccgtacttcagcgggatttgttcatcaagcgcgcgcatcgcatattttccgacgcggatatgcgccatgacgaagtcaacatccgtaaaagccgtctctgggtcatcagtcgccagaaattcaatgttcggcgctttttcttttataaatacctcacacgcacccgcaatccgctcctgcctttctttatcattgtcataaagtttcagctttctgatcggaaactcttccaggtgattcaaaagcattaatacaattccgggggtaaatgtgctgccgccgcctgcaataacgattgagaatgatttgtctgtcatgtgaagccctcctctgataacgtttacattttatttatatcatgagaaggtccgatctgtaccgggtttggaggagttagatcatttaatcatttttagttatttttctcaaaaagcgggaaagttcccacaggtacgaaaaaggcctgctgtcatcagcagacccattctcaaaaatgctcttgtaaatcagaaagcagcacttcctgctcaaattgcggatttccgatcggaaaaattctggctgtttccttgtcttcgttgacatgctgaatataaatcggaactccttcgtacgtcacatacgccatggcggcggattccgaaatgtctttcgcacgctgtgtattcacgtctcaaacctcctttaggcctcacacataacgtgtccggcagccaagagaagtatgcttgtttcttacaattgtccggtggtgagtttgaattttttgaggcgtttgtaaaacgtgctccgcgggattccggccattttggcggccagcgtgacattccccttcgctgattcaagggcgtttacgatgatgtttttctgaatgtgctcccggatggagacaggggacgcttcttcctgttcataagactcggccgcctctttaagacctgacgcttcaagcagggctgcgatggggcgttctgacagccgtccgtccgggaacatgacggaaagacgttcaaatacattaaacaattccctgatattccccggccatttccggctctttaataggtctaaaaagtcatcaggaagctccccccgccagccgcgatttcgctgaaattcaaggaagaggccgggaatgtcttcggtgcgttctcttaatggagggaggtggatcggacagacgtgaagccggtaaaataaatcttctctcagctttttgcattcgacaagctgtctcagatcagtgtgggtggcagtgatgattctgatgtcaacgggaatctcttttgtcccgccgaccggggtgactttccgttcctgcagcacccgtaacagagcgacctgcatggagtgtgatatttctccgatttcatcgaggaaaagcgtgcctttatcggctttttgcaaagcgccgttatgtcctttccgtttggccccggtgaaggcgccttccgagtagccgaacagttcgctttcaatcagcttttcggggaccgctccgcaattgacggcgataaacgggccgtttttcctggaactgttgttatgaatcgcccgggcggcaacctcctttcccgtcccggtttctcccgtaagacaaacggttgcgtccgttcgggcgacaagctccagctgctgaagcatatgtcgggatgacgggcttttgcctgccgcaccatggaatataaaagacggcttttcttctcgtttggataaataaacgcatgtgtagccgttctcctcccgcttcgcctgcttgatgtgaaagccctgttcctcaagctcgcgcagcgtatgtccggtaaaatgctgaacgggacggcttgcggcgataacccggctcatttcattgcaaagcacgatcggatcgtgagaccgggtaagcccggcgaacttgctgatcatgtcaagttctgtcattttgatctttagggcaagctcccgttccgccgtataagcgatggaggaggcaattccgagcataaacggctgagcgcgggcggcggggcaggaaatatcaatgacacccgccagccgcccgtcttcataacggatcggcgcggcggaacagctccattgatgagaagcgagcgaataatgttcagagccgtgtatcatgaccggctcttttgtataaagagccgtcccgatcgcattcgtgccgacggccgtttccgtccagcgggcgccttttaagaaattgatgcggttcgcttcatgaatggtgcgcgggtggccgtcaactgaatggacaacgccgtctgaatcaatcaggagaaccatcatttccatttcccgcatcgccgttttcattctttctgcatacggcgttgaggccgctaaaaataacgcatgcttttcggcctgcctttctaaatgatctgccggcattacattcggccccttttcgagataagggttgacgtcggcttttttgcagcggtgccatgaggcggccacccgcttctgaatacgggattcatcaagcacgccttctttcacaaagcgcttccaggttttaaaatcattccgaatgacattcattgtattcgctcccccctgttcagaccatcttttcatatattgtaggggaaaaataaagcgctttcaacgaaaaataccccttctcatctgagaaagggtattccggttatacggaatgcaccgcaagtccggtgacattcagcagggcttcctgaagcgtttctgacagagtcggatgcgccgcgataaagtgctccgacatatccgccgtcatttcaccgttcatcatcatgaccgcctgaccgatcaattccgtcacgtccggcccgatcattgacacgccgacgatttctccgaattccggttcggcaatgattttcattttgccgccatgctgatgtttaattaacgcttttccgttagcagaaaatgagcattctccgattttcacatctccgtatgtctctctcgcctgtgtttccgtcagcccgacagcggccatttccggcgatgtataaatacagcggggcaccgcccgcatattgactttgctgtcctttcccgaggcatgcgcggcggctgtgattccttcatgaatggcggcatgcgcgagctgcattcctccggccgcatcgccgcatgcgtatatatgaggcacattggtctgcatatggtcattgacttcaataccgcgcggagaataccggatgccggcctgctccagattcaggccttgcaaacgcggttttctcccgattgcaaccaaaatgtgatcagcctgagcctcaatttctttgccgtcttttgtccacacggcggttttcctttctttgtcaatccgctgaagggcggctttcgtctgaatatcagccccgctgtctcttaaagagtcttcgaaaacggcggcgatttctccgtcttctgccgggagcagccggtcagccgattcaatcaccgtcactttcgttttaaaccggctgaataaagaggcaaattcacagccgatcacacctcccccgacaataagcagagaagaaggaatttgctgtaaagaaagcgcgtctttgctgtcgatcacccaatcgccgtcaaatggggcaaacggcagctccgccggttcagatccggatgcaatcaatatccgatccgcttccagaatgtcttttgcgcctccttctccttcaacaagcaatgtctgctctgtgagaaatgaagctgtcccgctgatgactttaatctgatttgctttcattaagtattgaattccctgcacgagccggctgacgatttgccgtttgcgcccctgcatgcgggcccaattgagtgtaatgttttgcggcagttcgatgccgaatgtatctgcatgcctgattttatcgagcacattcgcgctttccaaaagcgactttgtcgggatgcacccctcattgagacaagtgcctccgagcggccctttgtcgatcagaacgacttcttctcccctccgcgcggcagtcacggcagctgcatatccggcaggcccgccgccgataatggctagtgtcaatctcttcaccctctctataaaatcaatccggccggctcttcaagcagcgctttgaccgttttcaggaagtccgctgccggtgcgccgtcacatactctgtggtcaaaggtaaggctcagcggcagcatggtgcttttgaccagctcatctcctttaaacgcaggcgtttcatagcttgcgcctactccgagaataccggcttcaggcggattaagaatcggggtgaaatgctcaattccgtaacccccgagatttgtaatagaaaatgtcgatccgtgcaggtcatctccggaagcattgccttcccgcgcccggcgtgccgatgtgctgatgtgatccgcaagctcaaggaatgaaagcttttccgcatcccgaatcaccggcacgacgagaccgttttcaagagaaaccgccatcccgaggtggacatatggataggtgatgatccgctcctcttgataagagctgttcagctcaggatgctgtttcagcgcaagcaccgcggcccgggatacgaaatgtgtgaccgtcagtttaacatcgctccgctttttcgcgctgtcggcgagctgctgctgccattttacaagctccgtaatgtccgctttcatagtcagcgtcagctgggcgctgttttgcaggcttttgtgcattcggtctgcaattacttttctcatcgctgaagccggttttccctccggctgtgccgtctgaaccgaagactgcggttctgattccgtcttcatggccttgatgacgtcagcttttacgattctgcctccgggccccgtcccgttcagcgtttcaactttcaacccggctttctccgccatttttcgggcaacgggagatattttcacgcggtgtttacgcttttgcacggctttgggagcgggaatatgttcaggttcagattgcggtttccctgcattttcaggagccggcgcctccttctcccgcacttcttcgccgttttccccgatataacagatgggcgttcccggcgggactccttctccctctttgactttaatatggagaagcgtgccgctttcaggcgcttctatttccatttctattttttccgagttgatgctggcgatgctttctcccttttcaaccgggtcgccgacttttttattccagacggatacttcacctttcttcatcgccattcccagcttcggcattactacttttacagccattctatatccctcctttaattcattgccggctcgccaagcaattcaagcgtgacgctgacaatttggtctggtgtcggcaaatattgatcttcaagcaccggcgaaaacggcactggtgtatgcggcgctgtaatccgtttaatcggtgcatcaagcaaatcaaagcccttatcggcgacaatcgcagcaatatccgtggcgatgctgcagcgcggattggcttcgtcaatgatgatcagccggtttgttttttctaacgatgtgaaaatcgcttcctcatctaaaggagacagactccggggatcaagcacctcggcgtcgatgcctttctcagaaagctgcgcagccgcttcaagcgcagtattgacctgcttgccgaccgcaaagagcgtgatgtcgctgccttcgcgtttgatatccgcctttccgagcggaattgtataataatcttccggcacctcgcccttcatgttgtaggacgttttatcttcaaaaaagaataccggatcattgtcttctattgccgaaagcagcaaacctttggcgtcatatggattggacggcacaaccgtcttcagacccgggatgctggtgaacaggccatacagcgcctgcgaatgctgagcggctgcccggaatccggctccgtatgtggtgcggacggtgatcggcacttgcgctttaccgccgaacatatagcggaatttcgccccttggttgatcacttggtcaaagcacgttccgataaaatcgttaaacatcagttccgcaatcggtctcagccccgtggatgccgcagccatggccgcacccatgtagcccgcctcagaaattggtgtgtccagcaccctgcttctgccgaattcctgtacgagcccctttgtgacccccagtacaccgccccatgcttcatcatcttgcaagtgatcgaccgccgctcccccggcgacatcttcaccgattacaagcacattgtcgtcttttctcatcgcaagcttcattgcttcattgatcgcgtccgacatgcttatgactctcgccatctcacattccccctttttcatatgacacgtagacgtctgtcaacagctcagactctttcggatatggactcttttcgctgaacgagacggctttttcaatcgattcgctgacacgctgttcgatgtctgacagtttatttgcatctgtttcttttagaagatagtttttaaagccttggatggcatccttttcttcaagatgctcagtcttttcatcctttgttttataagtttgggcatccccttcgaaatgtccgtagtttctgtaagtcatacattcaatcaaagacgggcctccgccgtttcttgctctttctatcgcttccccggctgcctgataaactgctaaaatatcttttccgtccaccgtgacccccggcatattgtaggcagccgcccgatcggcgattgaatcacaggctgacgcgtactcaaatgtcgtggcttcgccgtagccgttgttttcggcgatgaacacgacaggaaggttccatactgccgctaagttcagcccttcatggaaagtcccttggttattggctccgtccccaaaaaagcaaacgcttacatttttagtttgtttatatttagccgtgagcgctgatccgcatgcgagcgtgaatccgcccccgacgattccatttgcgcctaacatgcctttatcaagatccgcaatgtgcatagaaccgcctttgcctttacacagtccggtcgcttttccgaatatttccgccatcatgccgtccagatcacagcctttggcgatacaatggccatgtcccctgtgtgtgcttgtaatgctgtcgccatcatctaaatgagcgcacacccccgcagctaccgcttcttcaccggcatacaaatggacgaatccgggaagcactccttgcgcgaacagttcatgcactttgtcttcaaagcccctgatttccagcatcttttggtacatccacagcgctttctcctcagttaatgacaagccttctcgttttaacaattccattttgtgcgcctccttctatttagggttcacacttataaatgcaagaagcatgccagcctttgaagcccgtaaaatgaatgtttttatttttacaatggagacagtttgagacaggtgtctcattttgtctcaatctgttccctttgtctcgttttaaagcatacaaaaaagaccgggcatcaccctgtctttgacaatgatcgacgtatttatttcctcggaaatcttttaactgcttcattcttctgcatacagtctatcgtggcgtttgagtggttacactcttttttttcatatccacgtgctgcagttcatgcttttcttcaacagcccgattcagcgcttgaagcatgtagccaatgcctttatacgatgacaaaggccaggtgatatgctgatgctctctgatgacggcgtttaggacgcttcggtattttttcccgccaagcatgacaagctcttcgatgtcggaaaagcctttttcatgaaattgacggcgcagctcgtccgctgccatgatctccggatgaccggttccaaaagtgacatcgtaatttccgggaaccatatcatccggacgaaggaatccgtgctttgccgacaaaattacccactcatcgaaaaatgctttcgcataacgctcgcacgcctgatgaaacgggctgagataagcgtcttccgcccttaccggacctgtatctgaatggacatcccaaatttttttcttgccgcaggggatgatgcacagtcgtttcatttttctctccccctttatgatgtatctcctatcaatgtaccatgattcgtttatttctgcatgacgaaactggccatggatctgtctgggtaaaaactgcacacaaaaagacccggaattcaaaccgaaatccgggccggatgaagaggtatttatgtcactcttgctccatcccatcaagatactttctctcaaagtcatcgagcaatgcacgcacttcatctgttgactttgtattcatgcattgatttcttaattcacttgctccacggaatccgcggagatatatcttgaaaaagcgagggagcggtttatatgctcgagcttctgcttttgaatattcatcatgaagatccaggtgcaatctcaaaagatcaagcaattccttactgctatgctctctcggctccttttcaaaggcgaatggattagtaaaaatgcctcgtccaatcataatcccgtcaacaccgtattgttcagcgagtttcaagccggtttcacggtcaggaatatccccattgatcgtcaatagggtatccggcgctatctcatcacgaagtttcttgatttccgggatgagctcccaatgcgcatctactttactcatttccgctcttgtacgcagatgaatggaaagattcgcaatgtcttgtttcagtatgtgtgtcagccagccgcgccattcgtctatatccgtgtagccaagtctggtcttcacacttaccggcagacctcctgctttcgccgcctgtattaattcggctgcaacttcaggacggcaaatcaggccgcttccctttccattccccgccacattaggtacaggacagcccatattgatatccaggcccttaaaccctaattccgccatcccaatactcatttggcgaaagttttcaggcttatctccccatatgtgggcaaccatcggctgttcatcctccgtgaaagtcaaacggccgcgcacactatccttcccatccgggtgacaatagctttctgagtttgtaaactctgtgaaaaacacatcaggtctgcctgcttcactcacaacatggcgaaaaacgacatccgtcacatcttccattggtgccagtacaaaaaatggccgcggtaattcacgccagaaattatctgtcataacaaatccaaatcctttcatgatgggatacagccaaaccttgatcccaaaattaaaaactgaccatgcttcttttacacttatagcatgtgtcagcacttcttatcaaacgatagtaaattttgaacatttcactttttacacgtaaaaaagtgaaaaagcaaactgaagcagaacgccttaattgagttaacgtaatagactatcgctatagttaaccccatatcgttcatttctgatcaactcagccaactccttaacctttaaaagggtttgagagagaaaaaagtgtgatgattatctacacctattttttatttatattgtggtttattaatagtagcgctgaccttcatttttcttagcggccttacttttgctctttttgaacaaaaaggattccaacctaaatagaatatcatatgagttctccctattaccaatgcaaaataattgtcctgttatcgaagagaaaatatttaacgctgcaccatatccgtatctcaatatcatttgcgaaaaaataatttgattaaacaaatggggctgggggtggtatatctgggtactcaagagaatgtaaatagaaaaagccttaacttaccgcttgtgaatcacatggagtaaagaggatgggatgggatgggaagagaaaataaactcgaacttaacagaattcaagaacttcaatctggatcttttggatttgctcatggtttagaaataaccaacgcaacaagtggcttctgtctctatacagtatatgtactaagggtcgattggctttcaaaccccatatgttaatatctttatacaatcacctatatatgtttgtataaggttacgattcagtaatcctgatccaaaaccaataaaatagactgctgactaagtgccgcagtcttcattcataagattaataagaaagtgttcattttctttcatcattaaataaggcatcagaagttattgctttcatttcgaatatcctttgttatacctgtgatgatttgtataacagtgaaaacccccaagaaaacagtgacaatattaaaccatggattatcatagaatgaaagatatgtttgaaagaaatccagttcagctatgtttgctgggaatccattcatttctctataattaggaccccatccggttaattctgcaaaattaaaataaagctgtgaaactaaaaatgccaaaaccgtgagaaaccaactttttttatacaacggccgttttttgtttactttatccatttcattatccatttccttttctgcaatactttttagccaagtgacaatctaacatcattatagtatgaagcatgattgtcgcgataattacttattaaggatataaccatcgcaggtattactgtaatagttgttatcacttgtgtttccgcctcgggtttattccttctttgggaataaggaaaataatcggggtccttttttcctgtttaggctttcatatcatgtataacgaccaaacatgcttttttagtgtgtttgatcttttatccacagttgttgctaatagtagatgtgccaactgccgttgtgattagtgtaagtaagcaaccttgccttttacagcttctgcttcagaaccttcgttcagtggttgaggttccaatatctctcattcggtttcaccttctttttatcatttattacaactatcgccaatagtagatgtgccgatgagtgtcggggactttattctttaagaaagaagtttacaaaatattaactaaaattacaagtattcacggaacttgaacgacttgttattgcttctggttcacaacaagatcttcatattttgtctgtaatgccgtttccaaacgaaaaaaagaaagtgttaatagaaagcagcctacttggctgtttttcacttgcttttccatacgtttttttcaactctttttatcagttaaataaagacaaaagacagataggacaagggcaaaacatgaaaaaacccggaaatcggaattgtttaatttaccgaaatccaggtctgattacgaattgtttattttagttagacgattttaatacaagcttcgccacggcttccacatgagccgtctgcggaaacatatcaacaggctgaatatattcgacgcgatagtccttcgacagcgtctgcaagtctttcgccagtgtggaaggattgcaggatacgtagacgaagcgtttcggttttacttttttgatggtatctaaaaatgttctgtcacagccggttctcggcgggtcgacgatgaccacgtcagggcggaagccttctttcgtccatttcgggagccagtgttcggcagttcctgtgacatatgctgcgtttttgatgccgtgttttttggcgtttttcttcgcatcgtcaattgattctttaatgacgtccatgccgcggatctcttttgcgccgcttgaaacccacatgccgatcgtaccgacgccgcaatacgcgtctacgactttttcttttcctgtcagctgagccgcttgtttcacttcgtcatacagcttgaccgtctgctcagggttgagctggaagaaggcgcgggcgctcagttcaaatgacacgtcaccgagcacttcttgaatggcatggcttccggccaacgcttttgttttgtcaccgaaaatgacggatgtgcgcgcgccgttgacgttttgaataatcgatttcacttccggcagacggttctgaatggctttgacgatttcgtctttattcggcagtgtctctttcgcggtgacaagcacgacctgcacttcgcctgtttcaaaaccgactctcgtcacgatggtgcggacatcgccttttttggtccgttcgttataaacggatacgttgtgtttttccaaaatacggcaggcgatacccgttgttttgtttgtcgccggatgctggacaatgcattccttaatcggaacgattttatgggaatcaagtccgtataagccggcaatgatgctgccgctttgcgagcgtccgacttggaactggcttttgttccggtaattccaagggttgtccattccgatcgtatctttaatgttcatttcttcgacattgaatctcgtatgacgttccagagactgaatgacgatgtcgcgtttttcgcgaagctgctgagtgtatgccagatgctgaagctgacagccgccgcactggtcgtagaccgggcatggcggcgtgacgcggtgttcagacggcttgcggatttttttgacgcgtgcttctgaaaatttcggctgcacatttgtcgcttcggcaacgacttcttccccgggcagagcgccgggaacgaagacaacttttttcttaaaatagccgacgccctctccgttaatgccgagacgtttgatggtcagcggaaatgtctgcccgattttcaattcggcaggcgcctttttttgatgttgattcacgtttttttctctccgtttctatataaagcctttctcctgggaaagcggctgatttgaaatatcacatcttttcagtataacatgcagccggcggttccttcatgtttttcactggaagtttccaaaaagctcatcattcaatacttctccacaaatataaggacgcatagcttaaatacggcgcccattcgctgcttacctggagcatcacgtcttttgacggtttatcctcaagggcgaagcggcgtttgacggcgttttgcaggccgatgtccgccaaaggaaacagattcgggcggccgaggccgaacatgaggacgttttggacggtccacgggccgatgcctctgatggcgatcagctttttcataatgtcttcatccgataaatgggtaagttccgccagattgagcgctccttctgcaatcatccgtgaaatgtcaatcgcatattccgcttttctcatgctgaactggagctcccgcaagtcctgatactcaagccccgcgatcgttttcggctcgggatagcaccagacgccgtctttttgttcaccgaaggcatggacgaaccgttccgttaaagtaaaagcgaaggacaggttgagctgctggtggatgatgcatttcatgagacagttgtagacgtcatattccaagacgagcggggttcccgcatgctcctcaaaaagcgccgacagatttgtttttgagaaatgatcaagcacaggctgaagcggctgctcccactgaaaaatgtgtttgatccgttcaatcatctcctcgcggtccgtttctccgctgacgagaaagaccgggtctgcggcggtgccttccgcttgaaccgtgatgacggacagtttgccgtcccgtgttctgagcggcactttgattgatcttgcatgaagatcgaccgcattcagcggatcgagcgacagcctttcaaggactttatcaaaatgatacggcggtgtgaccgaaaccgtttccttccacatatgctccacccctttttgtccaagtatatcatgaagcggccgggcggcaattcgtatacttttcttcataacgccgcatgatataatggcaggcggagggttgtttatgatacatataaccgcaatcacaacacataatgagatattagataatatccccctatcacgtacagaacaaccggacatcgcatggtactggattgattttttcggcgctgagatgcatgaaaccgagctgctgcgtgattattttcactttcatccgcttgcgatcgaggattgctttcagcatatgcagcggccgaaaatcgaccattatgacggctaccgtttttatgtgctccacgctctgaacccggacacactggaaatggaagaggtggacatttttcagtccgaccgtttcatcgtcagcttccatttgcacgaatcgcccggcgtctcaaaggtgagagaacggtttttcgcttctccgggattagccaaaaaagggcccgggcacatcacttatatgattatggatcagcttgtcgatgaatatttccccgtgctgtacaaaattgaagaccggctgaatgaaattgaagacagcagaacccataaatcttacggcactttaatgaatgaagtgtttgaattgcggactgatcttttgaacctgaggcggacgatcattccgatgcgcgatttaatgtaccggattttgagccttgaccatgtaaaagaaagccgtgaaacgaaagcgtatttcagcgatatttatgaccacctgttaaaactggctgagctgatcgagtcaaaccgtgatatgacgtcagatttgcgggacagctatgtgacgctgaattcaaaccggatgaacgccattatgatgacattaaccatcgtctcgaccatttttatcccgctgacgttcatcgcgggggtttacggcatgaatttcgataacatgcctgagcttcattggaaatacgggtattttatcgttttgggcgtaatggccgttcttgtggccgccatgctgttttggttcgcccgcaaaggctggtttaatattttcaagtaagaacggctgccggctgttcttttttttgagaaaacatgatagtctggaaaaaaacgtaaagaggtgtgcgccgttaccatcctttctcacaaaatcatttcttctgtcctcctggctttcagtgtcatgtccattgccccgctgtataacggccgtacggtgtctgattacatctttgagtcgctcggcttttcctcttggctggaagatggagcccatatctccgtcattcccggggtcgtgctttactttgcggcgttaatctggtgtgccgccgcgttcaggcggacgcttcccgcggcggggctgtttctgatctttctcagtatgggggccgcttccggtatcagtcctgccaccgaatatgccgttttttccttaaaacagttcgcgcccgaaaaagaggctgtcgagtatttgaagcaccgcagcgaatgcagtcatctggttgagcgaaaaagagcgggcatgagctgcacgctttatatcaatcattacggaaaaggggaacaaaccatttctgtcaccccggatttatcagaaaacataaaggacgtcacattcaaatcaaaaacgttcactgtaaaaccccgttcaaaaacaatcatcaaaacccgatttaccggattttataaggggaaagccgcctcagactccggatggtcttcagaacctgaactgaaagtggcaatcctgtacacagcagattaaccattttgcatgtataatggtggaaaacttttcattggagggactgtcaaatgaagatcgccatcgtcggactcggcaatatgggccgccccatcgccgaaaatatcatgaaagccggatacagtctgactgtatataaccggacgaaagaaaaagcggctgacctgctggataaaggggcagaatatgccgaaacgccccgacaggcagctgaacatgcggacatcgtgctgtccatgctgtcagacgatgacgccgtaatagacgtaacgttcggagcttgcggcattattgccgggttatctgaaaacggcattcatatttcaatgagcacgatcagtacggcgctgtcagaacagctttccgccgcacattcgggcagagggcagtcctttattgccgctcccgtcctcggccgccccgatgccgccgagaaggccgagcttcgcatcatcacagccggaccggcggaagcgaagaaaaaggccgaaccgctgcttaacatcctgagtcagcaagtatttgacactggtgaagaaacaaaaacggccaacgccgcgaaaatcagcgtcaatttcttgctcgtgtccatgcttgaggcgttatctgaatcgttcttaatgatggagaagtacgggttagagcaaaaacaatttttagaaatcgccggcgcgctctttggctctcccgtctatcaaaattacggcacgatcatggctgaggagaaatttgagccggccggtttcaaaatgtctttagggctgaaggataccaatctggcgctcgccgccgcagaacaggtttccgcaaaactccctcttgccgaactggccaagagccattttgaaagcgggatcgcacaaggcttcggggatctggattgggccgctttgattaaatgcctgaaataacaaaacacctctccattaccaggagaggtgttttctacaggcgcggcagcttcatttctttctcaaacatcaggtcatcaatgcttttaaacgtgtagccttcttttttcaaatcggtaatggcatcgtccagagcttctgaattgtcctttgaaacggtgtggagaaggtagatcgcgccgggatgagcctgctttatcatgtgatcataggcgtattgtttccctttttgctcgttaaccttccagtcgacaaatgcgacggaccagaaaacggtttggtagccgaggcgcttcgtttctttgaggacatattcgctgaatacgccgcgcggcggacggagatacaggttgtcccgttttccggtaatgttgtacacagcttccgtgacggaatcgagttcgtcttgaatctgatcgcccgtttttgtcgtcagatcaggatgatgaaaagaatgattgccgatgatatggccttcctttgacatccgtttaatcaaatcaggctgctctttcacaaaatgacccgtgacaaaaaaagtgcccgtgacgtgatgtttttttaacacatcaagcactttcggggtgtacccattttcatatccgttatcaaacgttaaatagatggtcttttctttcgtattgcccaaataaaaggcatcatattttttgaccagattgtccagctgtctgccggcatccggcggctgatgattgacgctgcgtttaaagccccagtttatccgttcattcggcacggcttctgcgctgttgatgcctcccgcaagtaaaacagccatgcagcaaattgaacaaaaccatttcatgaccagcactccttctgcatttttccttattttgcagtaggccctgcccttttatacagccgcattatggaaaaagaaaaaccccggcatccgccggggtttattcccaatcctttttaaagcgttcgtattttgcttccagatcatcaagcatgccgatgagccggtctatatcttcaacgtccgttgattcagggtctaatgaatcaatgacattcataaacatatcgagtctgttcttcaggtaatcgagctgctgatctttgctgtttactgcattccccatacttccactccattcattttttataatggtagcgtattttttgccgtttttcaatggttccgctacttgcgatcttggcagatcaggtctaaaattaacagttggcagacgttagtatgccccatttataaaggagttagatagtcatgacacaaaacacaacactgcgtccgatcacaccggagtacgatccttgggaagcgtacatggatgtcgaccagtatggagatatgaaactgacgaacgttgaattcacaacgacgactttgtgcaatatgagatgcgagcactgcgccgtcgggtacacgctccagccgaaagacccgaatgcgctgccgatcgaccttttattaaagcggcttgatgaaattcctctgttacgctctatcagcattacgggcggcgaaccgatgctttcgctgaaatcggtaaaggaatacgtcgtcccgcttttgaaatatgcccatgaacgcggcgtgcgcacacagatcaattcaaacctgacgcttgatatcgggcgctacgaacggattattccttatttggacgtccttcacatttctcacaactggggaacggtcgaggactttgccgacatcggatttgcaatgatggagaagaaaccgacatttgaacagcgggcgcgctattttgacaaaatgattgaaaacagccgcacgctggtcgaagcaggcgtaatggtttcagcggaaacgatgctgaacaaacggacgctgccgcatattgaacatattcatcggcaaattaccgaagaaatgaaatgccagcggcacgaagtccatccgatgtatccgagtgatttcgccagcgcgcttgaatcactcagtctgaaggacatgagacaggccattcatcatctgctcgacattcgcgatgaagagacatggatgctgttcggtacgctcccgttttacgcatgcagccctgatgaagaagaccagaagctcctccgccgcctgcgggaagcgaaaaacgttacggtgcgaaacgaccctgacggccgctcccgcctgaatgtcaacatttttgacggaaatatcattgtcacggatttcggcgatacaccgccgctcggcaatattaaaacagacagccttcccgaagcatatgacaagtggagacagacgaagctgagcaaagagctgaactgccgctgcacaaacgtccggtgcctcggcccgaacgtccttgtcaaaaacagttattatcaggacacagatttttcattacgaaaagccagaggttaacaaaagatggaaacgacaattacggacattttgaaaagcaaagtggttgagatcatcatcgtcgctctcgtgctttacgccggtgtttttctgatcaaccgctttgtccaggtgttatttaaacgcacggatttcttggaggaacggaaagggaaaacgattgaaagcctcgtccgatccatcacccagtatacggcgacgatcggttttatcttttacgtcatttctttattcgttcatgatttcggccgaattttagccggggcgggtgttgccggtatcgtcatcggtttcggcgcccagtcgttaatcaaggacatattggccggtgtctttttaatatacgaacgccagcttcataaaggtgattacgtgacgattaacaatctgttcaacggcacagtcgaagaaatcggactccgttccctccagatccgtgagtggaccggcaagctgcttaccatatctaacggtgaggtcagacagcttcaaaactataacattgattttatgcggattaccgagtccgtcgtgatcagttacaaggaagatcccgagcgggtatacgccgtgttagaaaaagcctgcgacatgctcaatgatgagcttcgcgattcactgaagcgggatgaatttctcaatgcgacggagccgtttcaagtgcatggaattatgagtctgaacaaattaaccagaggcattgaatttacagtgaaaggcatggttcaagacacagaatacttctcggcgagccttgcggtgagacgcgttcttgcccgggagctgtacaacaacaatgtgcaattgctcgaggaaatgtatcacacacaaaaaagctgattcccgaaccggaatcagctttttttatttatctcggctgcgctgtcatttgaaaaccgaatgtgacgtgatcctgcaccggaatccaagccccgattccttgcgaagtcacatttttgacgacaagtttccgcttgctgcctttcagcaccaaatacacttcaccgtatgttacttttcctttttcattaacggccggagcgtaggcgtgcaggtagccgagccgctgcggagaaattttgtaggtttgatcgcgttttgtgcctgcgccgataaccgtttcaaatgcgagcggcagttttgttttcttcatcgctttttgcatcatcatgctttttacgtcttctgcgttcggcaccttcgctgtgagcccgcctttgattttgtattgctgttcttgggcgtatgagataaccgcggtttgctgtccgccccggttatccgctctgttcgtattgatttttttatattcccagttggcgaccgtttcgttcgattgatagccgagcgcccatttcccgagaaatattgtcgcccggtatccgatggcaagcggtgaaccggaaaccgaggattcattcagcatctttatcagatgcggattttcgatgttgatctctgatgtatctaacaattccttcgccagtttgctcggctgaagcatcggctggtcctgtgaagcattcggatacgtattttcctttgaaatgcttacgacagagttgggaactttaaacggtttttttgcaccggcagacggcgttgcgaaaaaactaaaggataacagcagaatcagtgtggcatgaaacagctttctcatcatatcactctttctatagcattttcctttagtcttttcctccgcaatcgttgttatccgcattttttacaggttaaagcaggaaaaaaccgatcgccataatgacataagcggcaaggagcgtagccccttcaaaccagttcgaatcaccgtcatttgaaatcattgtcatcaaaaggacggatgagatcatcgcgacaagctcgggcaatgtgaatacaagcggcatattgaccggaaaaaagatggaacagatcacaagaaccggagccacaaacatggcgatctgcaaagtcgagcctaccgcgatttcaacggcgacatccatcttgtctttgtacgccataataatcgccgacgcatgctctgcggcatttccgacgattgcgacgataatcactccgataaacagctcgctccagccgaactgttcagccaccgcatgaaacgtatggacaaggttttcagatatgtaggcgacgataatggttgaaataaataagacggctgtcgctcttttccccgaccactcaggctgctcctcttcttcctttgcctccggctgattcggctgataaacaccgcggtgggtgacgagcttgaaataaagagctgccacgtacaaaaggatcatgatgatgctgatgccgacactcaaatcaagcttgtttttttcccccatatccatggaaaacacttcgggaatgacaaaagcaacgataatggcaaaaatcagcaggcctgaattatgccgtgcatcatgaatattgaattcctgccgcttgtatttcaaaccgccgataaaaaacgacagtcccgcgacgagcaaaagattgccgagcaccgaaccggtcagtgaagcaagcacgatgcccgttagcccttcttttaaggcgaaaagcgatataatcagctctaccgcattgccgaacgtggcattcagcagaccgccgatccgcggtcccgcgataatggcaagagattcagtcgctctccccatataacttgcaagcgcaataatcgtcaagcaataaataataaacaaaaccgctgacggccagtgcatcaggccgccgatgactgaaagcggcactcccgccgcagccgtaaagaaaaaaatccgattcatatctgcctggctccttttttcgaatgagtctttttatatccttctcaaaaactccctcaattacacttccgcggcagcccgaattggcattttcaggttgccggacgcgacaaatccgtgtacgatcaagaaagatactgacgaaggagaaaatacgcgatgtcacgactgtacttctttattttggttctgcttgtttccatctccggattttcccaaggcatgcttctgccggtgatctccgtcatttttgaaacgaacggggaatcagccgctataaacggacttcacgcaaccggcctttatatcggcgtgcttctggcgtcgccgtttatggaggccccgctgcgcaagctcggattcaaacctctgatggtcatgggcggatttcttgttatcatcagcttattcagttttatttggcttcaatccatatggttatggttttttcttcggctgcttatcggaatcggggatcatatgctgcatttttcaacccaaacgtgggtgacgtcaaagtcaacgccccgaaacagaggaagaaacatttcgctgtacggactgtccttcgggctcggattcgctgtcggcccgttcatggtccctcttgtgaaaacaagtccgtcccttccgtttatcgtatccggctgtatcagtcttgccgcctggctgtttgtatttgtcttacgtaacgagtacccggcgcaaggtccggatgaaacatccggggacaacagcgcaaaacggttttaccgcgcccttcttttcggctgggtcgcttttctcccggctttcgggtacggttttttagaaacggcgctgaacggaagctttcccgtgtacgccctgcgcttaggtatatccgtcgatgccgtcgcgctgatattgcccgcttttgccatcggaagtattgtattccagttccctctcggtttattaagcgatcgattcgggagaaaacgtgtcctgctcgtcatcttattaacgggtgccctttgctttttgacggccggactgtttccgtcgccttctgtcatcggctgctgctttttcacggcgggaatggcggtcggcagtatgttttccctcggcatcagctatatgagcgacctgctgccgtcccatctgctgcctgcgggcaatctgctctgcggcatttccttcagcctcggcagtatgatcggcccggtggcgggcggctggtatatgcagcggtttgaaaacgccaatttgttttactttattacggtgattctggtctgtatttggcttgcgctcgtcttcgggaaaacaaagcacagtcccgcatccgaatcccattcttttccggcctcataaaaaagccgcctgatctaagtcaggcggcttctttctagtggtatccgttctgcccgttagcgcttccgcttgttttattcttcgggccgtttttggagttttgtttattatggcttccgccttttttcgtatgcttggtcataatcgattcccctccgtttttcagcttgaacgtcatccgttcctctatagcttgctcccgcggtacggattttcatcaggaagctttttacgtttatgtaaaagcgcgttgatttctcctcctaaaatcagcagtgttcccgtaaggtaaaaccagatcataaggacgataattcccccgatgctcccgtatgtggcgctgtagttggcaaaggtgccgacgtaaaatgagaacagcatactgacgataatccagcctgctgccgcaaatacggctcccggcagcacaaaacggagggaaagccttttattcggcgcgaaaatgtaaagcgcggtaaacacgattaaaaggataagcggactgataccccagcggacaaccgaccacacctgcaaaaacaggccggaggcgccgatgaaatctgcggcaagcattccgatttctctgccgaacaccggcagaagcaatgcgattaaaatcgtaaccaccatcgcgatggttaaaaaaattgaggtcaggcgaataatgataaatgagcggttttcctcgacttcgtaggcatggttaaatgctctgacaatcgcgttcataccattcgaagccgaccagatgacggcgataatcccgaatgacaaaagcccgccgctgcgcttgttcagcgtttgctccgttatggatttcaccatagacatggcactgtcgggcgcgtattgatcgaccgccccgagcacgtcttctgccgatatgggaagataggcggtgagcgtcagcatgaaaatcatcaacggaaacaatgacagcaggaaaaaatacgccagctccgccgatttactttgtccttcatggagagaaaaccttgcaaacagctcctttataaaactcatgacatcccacctcaatgatcgtttttcgaaaaatgctccttcgtttcttttaacaggtcaatgacctgcggcgtcgtctgcttcagcttggtgatctgcccgtttaaaaaactcagatcttccgatacggtattggcgatgattttcacttgatcaagttttgcagaagcctgctgtttcagggcttcaggatgttttcgataaaatgccgcacgccgcctgcacgcgtccatgttccggaaacatgcctctctcgtcggcttatgtaataaggacagtgctccgccggcggcagcgccgatcagaatcgcttttgccatgatgcgtgtctgcttcatcggtcaatcccccttataaatgatggtctttctttattgtctccagcaaatgacggcacccggactcgaccaaagcgtacacctcgctgaaattcccggtataatacggatcgggcacgtccgcaaggtccgactccggtacataatcaagcagccttgcaatacgcggcgccgcttttttataaccggccatgctgcgcagatgtccgatattttctgcatccatcgcaatgacgtaatcaaaatcggtcagatcagactcacgcacctgcctcgccgtgatgccgcttacgctgatccctttcttctttaggatctcctttgtcccttcatgcggcggatttcccgcatgccaggcgccgattcccgctgaatcaatgttaatctgcccgttcagcccgtttttcttcaccatatcagaaaataccgcctctgccataggcgaccggcaaatatttccaagacagacaaacagcacatgtatcatatcgataacctccctattctttccccgcattttgaggatcaaaaaccttatcatcatcttagcaacttttctgctgctgtggaaataagcttttattctaaatgaattctgttagaataaagggtacgaaaacggtcatgaaaggatgcatgaatttgccgagccaacaaacagaaacgttaaacaaaatgattgaagacatttcgcaaaagctcaacatgctcaatgtcggcgtcatcagagcggaagatttcagtgatgaaaaaatagaagatcttacataccttcatcaaatggtcatgaaaaaagcatcattcagcccgagtgaaatgcaggccattgccgaggagctcgcctctctcagaaaataaacccgtgtcagacctgccgaaaaacggcgggtctttttttgatttaaaaaagtaaaaaataaaagttcatcggtttgacacatataaaaagaaggagtatagtaactgtgaacttggtagaacgatatactaaatgagcgggccgcttatctttttttatttagtagaacgatatactcgttgtgatatcagcgttattcaagttttgtatctgcaaccgttttatcaaaccagttttcaaagaaaggcagtggttcaataaaggggaatggttctgtgcttttgttaatttaaaaattaatttaattctttattaaccgcattaggggatgtcatcatgaaaaacatatacaccaaaatggcagcgggtctttatattaattatttcctgctgggcatgatcaatattattatcgcatccaatatggaggcattatcaaaacagcttcatacatccgcagccggggtcagctatttggtctccgccatcgggatcgggaagctgatttcgcttctgtttgccgggaagctttcggatacattcgggagacggccgtttatcgtgtcgggcgcctttctgtatctgattttcctaatcggaattccgctttcgacaaactatacggccgcgtttatcttcgccattttcgcagggatcgccaattccttcttggattccgggacatatccggcgcttattgaaggatttccgaaaaacgcaagctctgcaaccgtgttaatcaaagcgtttgtatccatcggcgcgacggtgcttccgtttttcatcgcgtttattgcggacaggcatttgttttacggctggacgtttttcgtaccgggcattattttcttcctgaacggctttttcctgttaaaagttccgtttccgaatcataagcaaaaagaagacggcggccggacggaagcctctccgtctgatgacgcgttcacatcacagccgtcgatatggcgcgaaggtcttgcgatcattctgttaggcttttcatctacggcgctgtttatgctcgttcaagtatggcttcctaagttcgggcaaaccgttttgggcatgcctgaggtgcaggctgtcaaattgctgagctattacagcatcggtgcgcttgtgtccgtattattgctggccgtgctgttaaacagagtgattcagccgattacggtaatggtgctgtaccctgtgatcgcggcaatcgcgctgcttgctctgattttcattcatcagccggccgtatcagtcatcagctcctttgtcatcggactttcaactgcgggcattctgcaattggcgatgacggttatggctgttttattccctaaaaataaaggtacgatcacatcttttgttaatatagcatcaagcttatcttttattgtcattccgcttgtaacgggagcgatctccaaagcggccggcctgacgcctgtttttctgcttgatatcggaattgcggccgtcagcgcccttctcgcattgtttatcggaatccgctttaagcaagtgatgaaagcctgactattttttaagggagaggatttatcatgcaatctatcacgatcagaaacacggtcatcggcgaagggcttccgaagatcattgtgccgctgatggcggccggagagaaagaactgctcgaagaaattgaagccgtcaacaggcttcgcccggatatcattgagtggcgggcggatgtgtacgagcacgttgacagcctggacgccgtaaaaggcatgcttgaaaagctgcggaaagccgcaggcgcaacaccgctgcttttcacattcagaactcataaagaaggcggaaataaagttattgatgaccgcttttacattgaattgcttaaaaccgccatcgaaacaaaacacattgaccttgcagacgttgagttgtttacgggagaagcggaagtcaaatcaattgtgaaaaccgctgaagacaacggcgtatatgtcgtcatgtccaatcatgattttcatcagacaccgaaaaaagaagaaatcatttcccggctgcggaacatgcaggcgtacggcgcgcacattccgaaaatcgcggtgatgccgcaaagcactgaagatgttttcgtcttattggatgccactcacacgatgaaaacacaatacgcagaccggccgatcatcacgatgtcaatggcgggaacaggtctgatcagccgcctggccggcgaggtcttcggctcagcgtgcacgttcggagcgggcaaagaagcatcagcgcccggacaaattcccgttgaagaattgcgcagcgtactcagcattttaaataaacatatgtaatcagcgtttttctgcccttaaagcgggatgaaaaacaaatgaatggactaacggaggaatacatcatgaagaaagatttaggacggattaacggaaaaactcagcttatcggattattcgcgacaccgatcggacactctttatctccggcgatgcacaacctggcgtttaaaaaattaggattgaactacgcatacctcgcgtttgaagtcggcaatgaacagctggaagatgtggtaacgggaatgcgcgccttaaacgtcagaggcttcaatgtctcgatgccgaacaagatgaacattctcccttacctcgatgaactcgcggattcagcgaaattcaccggcgcggtaaatacagtcgttaatgaaaacggcagactgatcggacactccactgacggtatgggatacgtccgcaacttaaaagaacacggcatcgatatcacgggcaaaaaaatgacgctggtcggttccggcggggccgccactccgatagcgattcaatccgcattggaaggcctcggagaaatctctattttcgcccgcaatgacgcgtttttcgaaaaagcggaagaaaacgtccgcatcatcaatgaagaaatgaagggatcttcttgcaaagcgaaagtcttcccgctcgaagatcaagatgcgctgcgtgctgaaatcgcttcaagcgatattttcacaaacggaacgggtgtcggcatgaaaccgcttgaaggcttgagcgtcattgaagatacatccatgctccgtccggatttgattgtgacagacgtcgtttacaaccccgttacgtcgaaattgcttgaacaagctcaagcggccggctgcaacaccattaacggcctcggcatgatgctttggcagggcgccatggcgtttgaatattggacaggccgtgaaatgccggttcagtatattaaagagcaaatgtttgaataacctattgtgacagaagcgccgaaggacaatccgtcttccggcgctttatcattttctccccctctctctttcttctcatgcgccaaaacgcttataatggatgtaacgaataaaaaccaagtgaggaatgcgacgtatgaaacagcaaaaaaaacgccgggtgacattgcagcaggtcgctgaacatgccggcgtctcaacatccaccgcttcattaatcgtccgcaataatccgcgaatttccgaagcgacccgtgagaaagtgctgcaatccatgcgggagctggggtacgtatatgatcgggtcgccgcgaatttacgatcacagacgtccacaacggtaggattgattattactgacatttccaatacgtttttctcagagtttctgatcggcgttcagaatacgcttgaggaagtcggattaacggtgctgttaggcacgacatttgattccgtcgcgaagcaggagcagctgatctcgaccatgctggagcacagggtcggcggattgattttgtgtccggtttcaggtacggctgaggaaaccctttcccgccttgagcagcttgacattccggtcgtgctcgccgtcagggagattgccgatgccgactgtgattttgtcggagccgattatgaggaaggcacctataaggcagtgcgtcatttcattgagaaaggccatcaggagattgcgtttctgggcggcgtgaagcactcgtcaacatggacgaagcgcatgaaagggtttaaaaaagcgctccgtgaagcggatctggaagtaaaaaatgactatgtcattgacagcgcgccgacccgcgaagcaggctgtgaagccgtgacggagctcctccgccggtctgagcgcccgaccgcgattttctgcttcagtgatttggtcgcgttcggcgtcatgcaagggatcagaaaagccgggctcattccgggcgaagatattgacattgtcggctttgataacgtgccggaagctgaaatttcttatcccccgcttacaaccgtttcttcctttccgcggcagtcgggaaaagaagcggctcaattgctgcatcataaaatcaccagttcccagcacaaaaaacaacgcattattctggcgcctgagctggttatccgggaatcttcacaaaaaaagcggaacgcctgatacggcgctccgcttttatattacgcaagcagttttaatgattcgcggttgaatgccggtatgtcatccggtgtgcggcttgtgaccagctggttctggcagacgacgacttcttcatccacaacattcgcgcccgcgttttccatgtcgattcggattgatgtaaaccctgtcgctttgcgcccgtccaatgctttcgcgttgatgagaagctgaggtccgtggcagatggcgaacaccggttttttatcatccataaacgctttggcaaattggacgaaacgatcatccgcacgcagcatatcaggcgagaatccgcccgggatcagcaatgcgtcaaagtctttcggattcacatcatcgatggacgcatccactttcacttccgcttccccttgtttgcctttgactgtttttcctttttcctgttcaattacggttaattcatgacctgcatctttaaaagctttcgcaggttcagtatactcgacatcctcaaaataatccgttaatacaactgcaatttttttacccatagttactacctcctgcttgatgaagtctacataaatccatgtaccccagccacactaacatcaaacataggtaacgcgtttgccgctcatccgttttacataggtcattatcctcatttttcatctttttacaagaatcatcatgaaatctatatgaactttcacaaaatattcttacaatggtactgcatgacaaaatttgttgaaaggtggagaacaggtgagaatacagaaaagacgatgcagcgtcaatatgacactccgtattctgctgcccctagttatgatacttagtctaatcctcccaacatcacccattaaagcagaagaaaacaaatcctccagtgtgaatctcagcattttagccacaactgacgttcacgctaacatgatggactacgattactacagcgacaaaccgacaacggaattcgggctggcccgaacggctcagcttattgagaagcacaggcgcgaaaacccgaatacgctgcttgtcgataacggagacctgattcaggggaatcccctcggagaatacgccgtaaaatatgagaaaaatgatattatttcaggcgcaaagacccatccgatcattgaagtgatgaacagtctgcattatgacgcaggaacactcggcaatcatgaatttaattatgggcttgaatttctggacgggacaatcaaaggcgctgattatccgatcgttaacgccaatgtgaaaacattaagcggcgaaaaccgttatacgccttatgtcataaaagacaaaaccgtcacggatgaaaacggcggcaagcatcagataaaagtcggctacatcggctttgttcctccccaaatcatgacgtgggataagaaaaatctcgaaggccgcgttcaggtcgaagacattgtggaatccgcaaagaaaaccgttccgaaaatgaaagctgaaggagccgatatcgtcatcgccctcgcccacagcggcatcgaaaaaaaagcgcagtcttccggagcggaaaacgccgtttttgacctggcaacgaaagtcagcggaattgatgcgatcgtatccggccatcagcacgggcttttccctgatgccgaatacaaaggcgctgatcaatttgacgtcgataaaggcacgattaacggcatccccgttgtcatgtcaagcagctggggcaaatatgcgggcgtcatcgacctccggcttgaaaaaacagacagcgcgtggcatgtggaagatgcaaaaggcagcatcgagccgattgccggcaatgtgacgtcggaaaacgaaaccgtcgtcaataccgtcaaaaaagcgcacgaaggcacattgaaatacatcagagaacccgtcggccagacaaaagccgatatcaacagtttcttcgcccaagtcaaagatgatccgtccattcaaatcgtaacggatgcgcaaaaatggtacgccgaaaataagatgaaggatacggaatacaaagatctgcctatcctctcggcgggcgccccgtttaaagccggcgggcggaacggctcaaactactatacaaacatttccgctggcgacctcgccatcaaaaatatcggcgatttgtacctgtatgacaacacggttcagatcgtcaagctgaacggaagcgaagtgaaggactggctcgaaatgtccgcagggcaatttaatcagatcgatcaggcaaaaggcggcagccaagcgcttttaaatgacgcctaccgctcatacaattttgatgtcattgacggtgtcacctatcaggtcgatgtcacaaaaccggcgaaatacaacgaaaacggaacagtcattcatcccgatgcaagccggatcgtcaacctttcttatcaaggaaagcccgtcagcgccaagcaggaatttctgatcgtcacaaataattaccgcgcttcaggcggcggaggattccctcacttaagcaatgataaaatcgtatactcttctgccgatgagaacaggcaggtcttaatggattacatcatccagcagaaaacgattaatccgcaggctgatcataactggtccatccttccggtcaaaggggcaaacatgacatttgaatcttccttggccgcaaagccgtttgccgaccgcgcagatgacgtcgcctatatcggtgaatcacaaaacgcgggctacggacagtacaagctccaattcaaagatgatgaaccgggcacagatccgccgaaagatgacgcatggaaactcaccgttatgcatacaaacgacacgcacgcccaccttgataacgcggcgaggcggatgacgaaaatcaaagaaatcagaagcgaaaccgaccgcagcattttgctggatgcgggagacgttttctcaggcgatctctatttcacaaagtggcaggggctggctgatttaaaattgatgaacagcatgggttacgacgcaatgactttcggaaatcatgagtttgataaaggcccgggtgctctcgccagcttcctgagcgggaacggaagcgcggctgacccgtccggaaaatacaattttcaagcgcctgactttccgctcgtcagctcaaatgtcgatgtgtccaaagagtcaaaactcagaccattcatgaaaaaagcagacacatttacggcagggaaaaagaaaaaagcaggcatctatccatacattctgcttgatgtaaacggagaaaaagtcgccgtattcggcttaacgacagaagatacgtccgtcacatcaagcccgggaaaaagcattgtctttcatgatgccttccaatccgcacaagatacagtaaaagaaatacagaataatgaacatgtcaataaaattatcgccctgacccatatcgggcatcagcgtgatctcgatcttgccaaaaaggtaaaaggcatcgacttgatcgtcggcggacatacgcatacgcttgtagataaaatggaagttgtcaaaaacgaagagccgaccatcgtcgcccaggcaaaagaatatggcgaatatttaggccgtgtcgatgtcgcatttgacaaaaacggcgtcgttctgccggaacaatcctctcttcaggcgattccagtgaacgagcagacgaaagaagacccggatctgaaaaaagagcttgatccgtttaaaaaagagctcgtctcagtcaaaaatgaaaaagtcggctcaacgaaggtcgcacttgacggccagcgcgagcatgtccgctccaaagaaaccaatctcggaaacttcatcgcggacggcatgctgcaaaaagcgaaggaagcggccggcgcccaaatcgcgatcacaaacgggggcggcatccgcgcgggcattgataaaggagacatcacactcggcgatgtgctgaatgtgatgccgttcggcaacacgctttacgtcgcggatttaaccggaaaacagatcaaacaagccttggaacaagggttaagcggaattgaggctcaaggcggcgccttccctcaagttgccggtttaacatacacgtttacactgaataaaaagccgggacaccgcgttcttcaagctgcggccgtacaggatgacggcagcgtaaagccgatttctgataagaagacatacagagtcgccaccagtaactttgtcggtgaaggcggagacggatattccgtctttaacgaagcgtcccataaagaagaccttggctttgtcgactatgaggtcttcaccgagcagcttgaaaaagcgggaaaagcggtggaaccgaaagttgacggccgcgcgcaggaagtgtatctgccgacgaaacaaaaaaacggttcgtggacgcttgaagatgacagcgcatttgccgtttatgccaaaaacgccaacacgccgatcgtgtattacgataagaatgacggcgccaaaaagccgattgatctcagcgtgaccaaaaaacaaatcggcctgttaaaggacagaacatcggattcttcccttacgatcctgcatgacaagttcagcatgaaaatgccgatggcaaacgctgcttcagctgatacacgattcggcgtgacgccgaaaggaaaagtaagcggggcgctttcaaatgtatacgactttacaatgaagcagaaaaacaaagacatcaaaacattcaaagcgccggtaaagctcaccctgcgcattgagaatacgaaaaaggcgaaacagccgggcatttaccatgtagaccggaaaaagaacgtctatacaaaaacagacaacggttcggtttcacacgatctcgtcacgggctatacaaatcatttcagtgaatacaccatattaaacgcaaacacgaagagcgcgccgccgacaagcggagaccacggctccggaaagcagccaagcggacaaaaaccgtcatccggccctgcacaggacggagtatcgccgggcggcctgcttcctgatacggccacaacgatgtattccatccttcttgccgggtttctcatcagcgcgctcggaacggcactgtatctgcatcaaagaagaaaagcaaaaaaagtgaacgaagcataaaaagaccgcttttatcgggcggttcatccaaaagctctcctgatctgatttcaggggagctttttctctcggtccccctctgagtcgacagccgtacggccgagtgataaaatatgaacgttattcgcgaaagactgcatccgcatcgtttaacacttcacggcagggcctctctttcatacggcgccgcctgtttggaggactttttttgaagataacaggacacaaacgaaaccgcatgtcttacaagaaaaagctgttttacgtgataacagcgctctgttttatcagctcgctcattttcgtcactcacaacgcttctttttatgagcggccgattgccaaagtgacgaaaacaacattggaacatcagtctgacgtacaggacatgcataaaaacaaagataagattttcaatcagacgatcactgccagacttgaaaacggcagtcagaaaggacagctcattcatttgtccaatcagtattcatcatccggagcgaatgatcagaaatattcgattggagatgaagtattcgtttctattgataaagggaaaccatcaaacaaggatatatcgggaagcattatagataaaaaacgggataagcagcttttgctgatcgcttgggttttcatcttcaccttgcttatcgtcggcaaaaaacaaggcttcttttcgatcgtcagcctgatgtttaacgccgttttactgtcgtttgcattagatttgtacaggaagcatcctaatatagggttaattttcatctgcggtgtctgtattctcatctttactgtcatctcattgctgcttgtcagcggttttcacgcgaaaacatatgcagccattgccgcgacgctcgcaggcactttcgtttccctgctgattacgtatctggtgatgctggcaaccggtgagaaaggtctcagatatgaggaaatgcagtatttaacccgcccttatcacacggtgttcatggccggggtatttatcggatcactgggagcggtcatggatgtagccattaccatgacgtcatctgtcttcggattatatgaagaaaacaagggaatctcattacaagctctcagacgttccgggatggagatcggaaaagacatcatgggggcgatgaccaacattctgttttttgcttatataagcggctctattccgatgatgctgttgtatttgaaaaatgattccccgataggattcactctttctatgaacatttccttggaaatagccagagcattggccggagggatcggaatcgtattagccatacccgccagtctgtatgcttctatcttttttattaaacgaaagaaggcaagctcatgaatgtcatcgtaattctcgcggcgattttatttctattgatggtcatcatcggcggaaaaaaaggagcgaggtcttttattgcgttattcttaaatttcggtgttctctttctcaccatcattttcatgacagacccgcatatcaatccgattgttttaacattgctctcttccgccgtgatttgcagcattactcttttttatattaatggaggaaacgtcaaaaccgtaaccgcctttatttctgcaatgctgacgattgtactgctgctgttttttattatgtctgtaacaaaacatacttcgattcagggattcggtgaagaagaattgggtgatatcggcatattcacactgtttgtcggggtggattttgtgaaggttaccgcagccatgatcatcatgggcacgataggggcgattaccgatgtcgcgatttcaattacttcacccatgcgggaaatttacagtcataatccgtccatgagcagaaaagatctgtacacattcggattaagcatcgggagagatattttaggaacgaatacgaatacgttattctttgcttttttcggcagctatttggctttaattatctggtttaaagacttatcatactcagctgaaaaaatagtgaactcaaaagtattcagtgcggaagccgtcaccattctttgtgccggaatcgggatcggcatcatcattcccgttacatcctggatcaccgcctgttttttagcaaaaccgaataaacgttaaaagctgccgggacacgcccggcagctttttttatcttatacccactttacaacgtcttttgaggcagatcttgttttcgggcgcggttctctgacacggtagccgaatgcggccataacagagatgtcgaaacttccgttttccagaagcccttcttcttcaagaatccggtgaatttctttgtagttgaagccttctacagggcaggagtcgattccgatctgcgcagcggctgtcatcatattgccgagggcgatgtaagtctgtttggatgcccagtcaaacagcgcgcgatctgattctagcagattgaaatcatttttctggaagtcttccgttttgctgatatagccttcatacatatcttccggcatttttttgacttcccgcaagtggtttttgacatagtcggcgtcaaaacggatatcctttgccgtccgggcaagcagaagtacgaaatggcttgcggtcggcagctgcttttgcgcgccccaagtgaactcgcggagtttttcacgaagctccggattttgaacgacgacaaatttccaaggctccaaaccgagtgagcttggggataatcttcccgtttctaaaatgaattcaaaatcgctttctgaaatttttttctcaggatcaaattcctttgtggcgtgtctgaattgatacgcttcgatgatctgctgttttttatctgacattcatgatctctccttttcaatcgttatgtactattgtagccattatttttgaaagtaccagtacgcacatttttgtgggatagtattcattttgatactgacaaaaaaacgggctgccgcggcagtccgtttttatttttctcttctcgcaaagtcgacgaaacggaatttatcgagcctgtgccggctttccgtgtactgaaagaggctggtatcctccaaaaagacgcggtttttcacgaccgccatatggctgaacccgcctagatccaaatacttccggtcctcctcccccgccggctccacgacaatttccttttgcgcgtagctgatggagaggccaagttctccttcgagatactcatagatcgaatcttcacaaatcgccttcgtcaatagaggcacatgttttttcacaaagtaatccttgtccaaaataatatgttctccgtcaatccgtcttgatctgacgacttcccacaccttttcatccgcttctgtaccaagctcttttgcggcttctgagggaggcaggatcagcccgagacggtgaaccgtcgttctcgtctcttttccgagcgtttccgaaacctctttgaagctgatcaggcctgagacgggaaaacgcattttttctctgtctaatatgacggagcctttgcctttgattttctggatgtagccgttttgcgccagcatattgagcgctttgcggacggtttctcgtgatgtgccgtattgatcgcacaaatcattttcagacggaagaacgtcttcagcctgccgctggccactttcgatctgccgcaccatatctttatagattgtgatgtatttattcactttcatttgaccacccagattagtgtatcacgcttttgtcagatgataaacgatcgattcatacggacggagcgtcaatcgttccggccgcccttccctcggttcatcattcgtcagcagcaccgtaaaccgccagccgtccgtgtctttaagcggaaccgtaaagtccgcttctttcccgtagaagttgttgatgcacagcagtttttcatccttgccgtgtctgacgtacgccagaaccgccggatcgtcttcagcaagcagctcaaacgttccttcagtcacgatgtcatattcttttctgagcttgatgagcttctgataatggtagaaaattgaatccaggtcccgcaaagccgcttccgcgttaacgtcccgataatcatccgccgccggaatccaaggcgtgcccgtcgtgaaaccgccgtgcggcccgctgttccactgaatgggggttcttgcattgtctcttgatttctcttttaaaatggcgataatgtctttttcgggcacgccttcttccttcatctttttgtaaatattcaatgattcgacatcgcggtatgagccgatatcatcgaatttcggattgcccatgccgatctcttcaccttgataaatgtaaggcgtgccctgcatcatatgaatggccgccgccagcattttggctgatttcgtccggtatacgccgtcgtctccgtatctggatacggcccgcggctggtcatggttgcaccagaataatgcgttccagcctccgcctttttgcatctccgtctgccaaaacgctaaaatccgtttcagcttcagaaaatcaaacggagcgagcgcccatttttcaccattcggataatccacttttaaatggtgaaagttaaaagtcatatcgagttctttattctcagggtttgtgtaccggatgcagtggtcagccgttgtcgaggacatttcaccgaccgtcatgctgtcatatttcgaaaacacttcccggttcatctcatggagaaattcgtgcacgcgcggcccgtccgtataataagggcgcccgtcacgcccatcctcggcatcaggaaacgattggtctttagaaatgaggttgatcacatccagccggaaaccgtcgattccttttcggaaccaaaaatgcatcatgtcgtaaacctcttttctcatctcttcattttcccagttcaaatcggcctgcgacacatcaaataaatgcagatagtgctggcctgacgccaggtcgagctcccaagcggaaccgccgaattttgattcccagttgttcggcgcccggccgtcttcctttccgtctttccaaatgtaaaaatcccgatacggactgtcgggtgacgagaccgcttctttgaaccaccgatgctcgactgatgtatggttgacgacaagatccataacgaccttgattcctcttttgtgcgcttcatcgagaaggcgttcaaaatcctccatcgttccgtactcttcataaacggtgcagtaatcgcgaatgtcataaccgttgtcattctgcggcgaatcgtaaatcggcgtaagccaaatgacatcaatcaaaagcttctgcaaataatcaagcttctcgataataccgttcagatcaccgatcccgtttcccgtcgtatcattaaagctcttcggataaatttgatataccgctgcctttttccaccatggtgtgctgtctgttttcatttttcttcaccgcctgtaatgttttgaattgaaagggaaaagggacagcctgatagaaggcgccccgcaggttttctatttttgccgtttcagccgcgcatacccgtatgttcccgcaaacgggagaatcagcacgatcagcattccgatcgcaaacggaccccagtaccggctcataatggagaagatccccggcacgccgccgactccgaccgagcttgcgagaacgcctttgacggagatgaacatccccgcgattcccgaactgatcatggcgatcacaaacggaaatttgtaacgcagattcacgccgaaaatcgccggttcggtaatgcccaaatatgcggaaatgccggccgtcagtgaaagcccccgctgttttttatcttttgtaatcagcatcatggccaaagccgccgatccttgagcgatatttgacaatgcgagcatcggccataaaaatgtgccgccgagctttgatccgattaattgaagatcgaccgcgagaaacgtatggtgcatccccgtgatcacaagcgccgaatacagccctccgtacagcaggcctccgatggcggagaattgtccgaaaacggcaatcaatcccaccgtcagcgcgttaccgatcgcaaaggtaatcggaccgatgatgacaaaggatagaaaaccgatgaccaaaagcgtcaccggcgcgacgaccaacagctgaatgccctccggcgtccgtttcgtcaaaaagagctcaagcctggcaagtaaataagacgccagcaggatcgggagcacctgaccttgatatccgactttctgcacctcaaggccgaacaggttccacaccggaatatcgccgctctgctcggcagccccgtagccccatgcgtttaacagatcaggatgcaccaacatcagcccgagcacgatacccaagagcgggcttcctccgaaccgcttcactgccgaccagccgattaaagccggcagaaaagcgaaggccgtccccgcgatcagattaatcatattggcgagatccgcccattgcggatacacttggacaatcgatttggcgctgtagaaaatgccttccgccgttaatatattgttcagacccattaacagcccggccgtgacgatcgccggcaagatcggaataaagatgtccgcaagcgttttcacagcacgctgtaaaggattcatgttttgcgccgccgccttcttcacgtcatccttggacgcttcacccatccccgtttccttcactaattccgcatatactttgttgaccgtcccctgcccgatcacgacttgaaactgcccgtttaccgcaaaagatcctttgacaatgtctattgcatcaagcattttttggtttactttggtttcatctattaatgcaaaccgcaaacgcgtcacacaatgagtcgccgcctcaatattttcgattccgccgacagcttcagcgatctgccgcgcagcccggttaaactcacccatgccatcccctccgtaaccgttttcattttgtcttgcaaacttgtatatacatgtttatgactctattgtaatgatgtatatacatgtcgtcaatctatttttatagcgctttcatcacaaatatactgcgaaagaccctgaaacaaaaaaagccccgccggaaccgggccttgacttcttgtttatcgggaacatgtccgggcggaattcacaacaggagcacaaaaagcatacagtactgtacaactaagttaaagaggtgtgaagagatgccatccactgttatcaacctgtactatttgaagattaacagtatttctggcaacggatctattacgattggggaagcggcatacaacagtcccaccacaaataacaaatcacaaggactgaactcttcattcggcgatacgtcacctatagaatcgatgatggagaacttgttaaatgatcctgatgtcaacgaccagacagccatcggaaccgcagataccgcaaatattacgccggtgccgcccattatagattaaaggggtttttatgaatgccttaccaaattaacgtcgtcaatataaaagtaaacggagcaacgcaaaacggaaacgtcgatatcggtcagaccgtacaaaacagccacaccgccaacagcaaatttgtcggcgcgaacttttctttaggggatttttcgccggccgccggatgtttgaattcgggccatcttgaccctgacgtgagcgatcaggatcagatcgccaacccgtcaatgccgatcgcaaatcaaatatagggaggttctgccgaagtggatatcgagaaaatgagaaagtggcttgagattacgaacgagcacaagcccagcgaattttggaccaatgtcctgaaacggaaatctctcgaagattttttctccttacaaaaaaacaccctgacttatgatatttatcaggatgaacagcacacatttgtcattgtggaaatgcccggcgtttacgaagaagaattgacattgaggctgctgtcaagaacacggctgcatataagaggaaacatcacacccctttttccaaagaacatgggcgtctgccaaaaccggtattacggggaaatcgatgagacgattgagcttcctgaaccggctgagccccacctgttacaggcgcagtgcgtaaacggcctgctccacatttcctacccgcgccttatggagcacattccttttcagaaaaaaatctaaagagccggcttacgggcggcccagccgtctgtacactttctccttataatgagaagatacgggttttgagaacatggctttctcctccgtcagtttgtcgagtctgacttgtttttccgtccgtttgttccgcaggtgatcccgctcctgttcattgcggcacttggcgatcaaataatcgagcgtcatcagctctttcttcagcgcgccctcatcctcggcgatcccggcgttttttaatatgcggtagcccattctgagcgactccggaagatgtgcggcatcgtctttcggcaggggctttcccattcctttgatgccggcgaactctccatccttaatggcgcgcttgattttatcttcagccacgatatgggcaatatccatcactgttcacctcttttttcaatagaaccgggtatgatcatacggaaacacaaatcccagtttgtgccatttatatgttttaaagctgtcattcaacagatcaaccgccgttgcgacagcgtttttcgccctttttccgatgagccttttccaccttttctatttgctggtttcatggtatattgattacgttcgttttttctatcgttccgtgtaaaccgtgatcggaaaaaaggagtgtaacaatgaaaacatttataaaagaaagaggacttgccttcttcttgatagcggtcgtgttattgtgggtgaaaacatatgtcgcttatattttaaactttaacctcggcatagacaacacgatccagaaaatattgctttttgtgaatccgctgagctccagcttgttctttcttggatttgggcttcttttcaagaaaaaattacagcagacagccattattgtgattcattttttattgtcttttttgctttttgcaaacatcgtctattatagattctttaatgatttcattaccatcccggtcatgatgcaggcaaagacaaacggcggccagctcggagacagcgcgttctcgttaatgagatggacagacgccttctacttcctggataccgtcattttgattattttggcccttaagatgaaaaaaccggctgaaaaaccggcgaagaaatcattcagaatcgttttggcttccgccgtgcttatgttcctgatcaacctcgccgtcgcggaatccgaccgtcctgagcttttgacacgctcatttgaccgaaactatctggtgaaatacttgggcacgtacaactttacgatttacgatgccgtgcagaatgtgaaatcaaacagccagcgcgcgcttgccgattcaagcgatgtaacggatgtagaaaactatatgaaggccaactatgacgtgccgaacaacgtctacttcggaaaagccgaaggaaaaaacgtcatctacgtctcattagagtctctgcaatcctttatcattgattacaaaattaacggcaaggaagtgacgccgtttttaaacaaactggcgcacgataatcaaacattctactttgataactttttccaccaaacgggacaaggtaaaacatctgatgcggaatttatgatggagaactctctgtacccgctttcgcaaggttcggttttcgtcaataaagcgcaaaacacgctgcagtccgttcctgcgatcttaaaaggcaaaaagtacacgtctgccgctttccacggaaatacgcagactttctggaaccgtaacgaaatgtacaaagcggaaggcatcgataagtttttcgattccgcttattatgacatgagcgaagaaaacacgaaaaactacggcatgaaagacaaaccgtatttcaaagaatccatgccgctcttaaagagcctgccgcagccgttctatacgaagttcattacgctgtccaaccacttcccgttcggaatggataaagaagacacggacttcccggcgggagactttggcgattcagtcgtcaataactacttccagtccgcgaactatctggatgaatcaattgaacagttctttcatgacctgaaaaaagacggcctgtacgataagtcgattatcgtgatgtacggagaccactacggcatctccgaaaaccataataaagcgatggcgaaagtgctcggcaaagatgagatcactgaatacgacaatgcccagcttcagcgggtgccgctctttatccacgctcccggcgtgaaaggcggccgcaatcacaaatttgccggtgaagtcgatgtcgcgccgaccgttcttcatctgctcggcgtcgatacgaaagattatctcatgtcaggttcagatatcttatcgaaagagcacagagaagtcattccgttccgtaacggagacttcatctcaccgaactatacgaaagtgtccggcaagtattacgatacgaaaaccggaagacttttagatgattcagaagtcgacaaaaaagaagactctctcgtcaagactgagcttgaaatgtctgataagatcatcaacggcgatctgcttcgtttctatcagccgaaaggctttaagaaagtggacccttcacaatttgattatacgaagcgtgaagattcctcagcagatgatcaaaaagaataaacaaaagccagatcatatcaatgatctggcttttttatgttcagctcccggcggcggccatagagcgcttttgcaggctgtcggaaagaactgaataagcgacgactttctttttctgctgtttgacgacatctacatgatcttcgtagctgtatacaaacaccgtcacatctttttttccttttctcgtcttaatgacaagcggatcggctccgttttgcggatgaagataacgctcttcatcccctgggtatatataatgccgttcgataaacacggcttcgttaaaatcatcaatcacccggcgtttgtcttcgccttccagacgttttccgccgagggaaacggcagcggacgcgtcactgagctttgaatgggtttcaaacttgcggaggatccattccaccgctccggtaggaaggcatgtcagcacaatcttaatcaggcttatgacaacaattgaaacaactgcaatccatgtcaccttacatcatctccatacttgttctacctgaatcttaacatagaagaaaacgttgttttttgtacattatgtgaaacttgatatatgttcaaaaaaaatccggatcacctaggtgatccggatttttcaagtttgcttctggtcgtcacggcggacggcttctctcagctcttccgcgacaaattcgacgttcggcccgataatgacctgcgccgttttattccccgttttgataaccccttttgctcccgcttttttaagcgccgcctcattaatgagagacgtatcctgcacggtcagcctgaggcgggtcgcacagtgatcaatcgtttcgaggttttgcctgccgccgagccccttgagcatggcatgttcttcgacggaaccggccgtatcttcactaagcacttcttcctcttcctcatcatcttcccgtcccggcgttttcaagtttaacgttttgatgagcatatagaagacgacaaaatagatcactgcataacaaagcccgacaacgagcagcaaaagcggtttttcggcaatgccgtagctgaggagataatcgatcgcccccgccgagaatgaaaaacccgacctgattccgagaacattcacgataaataaagagaacccggttaatatagcatgaaccccgtacaaaagcggtgataaaaacataaatgcaaattcaatcggctctgtaattccggtaataaatgccgtcagcgcgagaccaatcatcattccggccgtcgctttgcgcttacttggcttagccgcggcaatcattgccagacatgcggccggaagcccgaacatcataatcgggaagaatcccgtcatataagttcccgccgtcggatccttcgcaaagaagcgggccagatctcccgtttttccgtgaaaatcgccaaactggaaccaaaaaatattattcagcacatgatgaagaccgaatggaatcaaaagccggttaaaaatcccgtaaatcccggcgccgattccgccaagcccgatcatccattccccgaaagacgtaatcaccgactgaatcggcggccacacaaatccgaagatccccgccaaaataatggtaatcagcgccgttacaatcggaacgagcctgcgcccgctgaaaaacccgagatattcgggcagcttcgtatccttaaaacgattatacgtgtatcccgcaattaaccccgcgataatccctccgaaaacggccatattatttgtcgaattgattgattttacagccgcgtccagcatgatataagaaattgctcccgacagagcggcggccccgttgctgtctttggaaatcccgatcgcgattccgatcgcgaaaatcagcggcagatgatcaaatactgcggtccccgccgcgtaaatgaacggaatatttaataagtcctctctgccgatggccaaaataataccaacggcgggcagaacggcaatcggaagcataaatgattttccgagtttttgcaaaaattgaagcattttacccatcccccttcttttttcttaaatataccacataagttatctagtgatctataccaattttccttcatttattcacataaggcttgttggttttctatttataaaccagttgtggtaagcttgaatcagatgattaaaaatagaaagcgggaatgacaatgattgtaacgaacgatcaagaattagaaggccttaaaaaaatcggcagaatcgtcgcgctggcgcgtgaagaaatgaagaaaaaagccgaacccggtatgagcacgaaagatcttgacctgatcggaaaggctgtgcttgacgagcacggagccgcttccgctccggagaaggaatacgatttcccgggcgtgacatgcatcagcgtaaatgacgaagtcgctcacggcattccgagcgcctctaaaatcttaaaagccggagatcttgtaaatatcgatatttcggcggaattcggcggtttttattccgatacgggaatttcatttgtgctcggagaaggcgatgaacgtctgcaaaagctttgtaactgcgcagcatcggcatttcagaaaggattggatcaggcaaaagccggcaaacgccaaaaccagatcggcagagccgtctaccatgaagcccgctccaacggatttaccgttattaaaacgctgacgggccacggaatcggcagaaacctccatgaagcgccgaaccacatcatgaattactacgatccgtttgataacgcgctgtttaaaaacggaaccgtgatcgcgcttgagccgtttatttccacgaaagcggaaacgattgttgaagcgggagacggctggacgtttaaaacgccggataaaagccttgtcgcccaagtggaacacaccatcgtgatcacaaaagacaaaccgattattttaactgcactgtaatgtttcatctcccttccaaacaggtatacaacaactaacccgaaggagggagacgcatgaaaaaagataaagaaaaaatcaaaatcgaaaacgaaatacacgccatgcacggcgtaacgaaacagcagattttagaggatttcgaggaatttaaggcgtaccttcatcagaaaatttccgccggaaaaaaactgggtctggatgacagcaaaatcatcaaaagcgccgccatcctcggggactatctcgccaaacacgaggagccccgcaatgcggaagaaaaactcttacaagaactgtgggacattgcggatgacaatgaaaaacagcatttggcccagcttctcgtcaaacttgccggacactgatacagtgcccggcttttttatgctccgttataagagttgtgctacactggacatatgtctgtgaaaggagccatttttcaacatgtggtttattatcttcgggtttattttctttattgaaagcatcattctcaccgtttacggagtgaagaaaaagaaggggatgctgatttatttcggcgtcgttttcggaatcatgacactcggaacggtgctgttaaaattaaccggccattaagcatgaaaagaccgccctttacatatatatgtaagaaagctttacatctctgaatcgaaagtctcagtttttgcgttatcccttttcagcgtctttttatagatgttacaatgccaaaagtttggcaaaaactgaagaaacctccccagcgggagaacggagaaaggagttttctgacatgcattatggcagtaaaggctggtatgtagaagagttaaagaaaaaaggaattacccactatgaaggaagaaagcttcaaagcttcaaaaagtacttccttgccaatctgctggaaacaaaaaaacaagcataacgtaaatcagccgtgctgtcagtgcagcacggctttttttctatacattagtgagcctgtctctttttttaaggaaggactccctccagctttctgacagcgcttcttcccgcagtatttcttcaatcgctgacagattgccggaatcacgatatttcacttcattcgcataccagacggaaatgctttcttttcctctcgacagacgcttgaggacgggacgcggatcgacatatccttcttcaagcaccctgaaataaaagccggtaaatcccgtctgctgtacacggagcaccatatctttgatgccatatttgagcgcgagtttgacgcagggctggcgcggctggcttacttgaacgacggcttcccccagctgaaagacgtctccgatccacacgtcttgttcggcaagtcctttgaccgttacattctccccgaacgcggcggcgggaagttttctcgcgagcgttgtttcccaatatgaataatgctcggcgggatacacgcacaccgctttatcggggcctccgtgatgcttcaagtcggcttgcccgtccccgtcaaaatgggttttatacagcatgacgggagaatctgcgggccgctttatgatgccggaattgatttgtctgccggcaaattcatgaattgcgggctttccgagattgatagataagacagaatagtcttgcgtcacctcgttcacatcctttgcgaaatctcatatctttcctttatcatagtaagaaaaaggtggtttttccatgcttcaatatcatatgattgcagacggccgggttcagggcgtaggttttcgctacttcgtccagatggaagccgacagacataaggtagccggctgggtaaaaaaccgtgatgacggccgggtggaaatccttgccgaaggtcctgaagagtcgttaaaacaatttgccgaagcagtcagaaaaggcagccccttctcaaatgtcacaggcgtaaccatcgaagaatcacaccgtctgaaagggtaccgcacttttaccatcagttactgataaggcttgtcctgataataataattcggcttcacaatcgtattgtcatatgatttatggaaaatgtgggtggaagccggcgagatcggcggaatcagccaggtccagtcgcccgtcagctttctgcccgcgtcttgttcctgttcttcaaagcgtttaaattgattcgccgccgtatggtgatcgacaatgctgacaccgtgttttttgtatgaatagagcactgccttattcagttccaccagcacctgatctttccacaggtcggtattcaggctggcggaaatccccatgaccgcagcggcttttttgagcatatcataccgtttttcgtcagcaaggttccttgcgccgatttcggttcccatataccatccgttaaaaggcgccgcgttgtacgacagcccgccgatttcaagcctcatatcggcgataatcggaaccccgtaccatctgagatttaaatcggcaaactcttcaatatccggatgggtgatcggcacttctttcacgagcgtctgaggcaggtcataccagaccggctgcccgtcccctttcatccggaaaagcagcggcagaatatcaaaatcggtccgcttcccgcgccagccgagtttttcgcagacagccgtcagctcatatgatgccggatcaccgactcttcctttttcagtctcatatcccgcatagcggatgagctggtgattccagatctccacttgtttttccccattcttctcaggagggaaaatcgtaatcgtcggtttaatttttccgccgttcgtggcgatttcaatatgttcaaataatgcgtcgcgcacctcttctttcgttttcacaccgcgccggtcaatgacgttcagcgattgccagaacagacgcccgatacagcggttgctgttgcgccacgccattttcgccccgtgttcaagctcttccgccgtatggacgtaactccccgtccgatctatctcatcttttatcgcgtgtagtcgctcgttgatttgcgattccattccgagttcctgatagcagacatcaataaaatccttcgcctcatcccaaagtatttccgtatgtttcaaaaaactctctccttcaatttacatctgtttcccattgtatcgtttttaggtgtgaacacaatggtttttttgtatcatactggaaactgcaaagaaaaaacacctgtgatgttcgcaggtgttttacaaaacggaatgcagtttttcagccagtgtaagcaaatcctcacggtagttttttcccgtcatcggaattccgtgacccgtcaaaagcgcttccggctccagttcggccaatttctcaacggatgcggccgccgtctgcgtatccgctgtaaaataggcgggcggcccgtgaagctcttgcttttgaatgacaacgtccgcaagcgattcctgttccacagtgatcacggcatcaccggcaagcagaacgcggtctttatcccggaataatgaaatatggccgggtgtgtggccgggcgtatgcacccatctccattcttcaagaaacggaacggtaccgtctgaaggcagtgcctgaacggacggaatgcggatcgtatggcgcggaaacagcggtgacagctttgcgacaagcccttttttcgcatcgggcctggcaggcggataatccgctttccccgtgacgtacgggagctccttttcatgaatataaaccggcacatcccaaagctcaagcagctcttcaatcgcaccgacatgatcaaaatggccgtgtgtcaaaatgaccgccttcagctgatacccctctttgaatcggcgtttcatttcttctgttatcatctccgccgattgaggcattcccgcgtcaaccagaatgatttcccgcggagctgagggattttcgataaagtaaacattcgcaatctgcacggtcagtccgtaaacgccgtccgccgctttaaaaccggcgccgcttctcactgaaaaaagcggcataaacggatcactcatcatggcacctcctctgatgcctttagtgtgcgacgaaccgggtgttttatgttaaaaaatcgtgattgcgccgatgatgagcgcaaaggccgtcatgacgataacggcaagaaccgcccatttcatcgcaaatttctggtgttcatcaatggtgaccccggcaagcccgactaataaatgcgtcgacggcacgagcgggcttaacatatgaatcggctggccgataatcgaagcgcgggcgatttccaccttatctacaccgtacgccacggcggtctcggataaaatgggcagcacgccgtaaaaataggcgtcattaggcatcagaaacgtaaagataccgctcgttaaggcaacaatcgccggaataaaacctcccatctgttccggaataagcgatacgagggaaatggccatttcatcaaccatcttcgtccccgttaaaattccggtaaacacgcctgcggcaaaaatcatcgaaccgatcgcaagcacattgctcgaatgggctgaaatacgctccctttgatcgttaagcttcggatagttgacaatcagcgcgatacaaaacgcaatgatgaacagcacggttaaattcacttttcctgacactaaaaatcccactaaagaaagcgttaacagtaaattgaaccaccacagtttcggccgcctccattcatcttccgcagccgcagccgtttcatttgtatgggacggctgctttaattcgatcaccccgagccgttttctttccatccttccgagtacataagcgaccacaatcatacacaccattccgctggcaatgacaggcagcatcggccccgtcagctctgccgggtcaacgccgagcgcactcgccgcacgcggcgtcgcgccgccccatggtatcgtgttcatgatgcccatgccgacaccggcgattcccgctaaaataatcggacggattccgagcatgatatacaaaggcagcattgcgcttgtcgtaatcatatacgtcgtcgagccgtctccgtccagtgcgacaagcatggtcaaaacggctgttccgactacaattttgagcgggtcgcctttaaccagctttaaaatacgcgacaccatcggatcaaataaaccggtatcaatcataatgccgaaataaagaatcgcaaacataatcatgactgcaatcggtgccacctgttcaatcccggaaatcatcatctcgccgacccggttaaaagaaaacccggcaaacagcgcaaacacgatcggcgttaatacgagcgccgttaacactgaaagccgttttgtcataatcagcaccataaaaacaagcatcataagaaagcctaagattgctaacacagtatgtcccccttatcgtgaatacgcttacattttaaaggcccgatcccctttatccgcctttttgctatcttatgagaattggatattgaagtaaatattttggattttaaagatttttaattttttataaccttttcgttcattttgttcatttataaataaaaagcctcccgcaaatatgcggaaggcttatttttcgctgctcatcatctctttataaaactcggtctgctcttctaaaaagcgttttgcgccgctgctgtttttataaaagctctcccaatcccgttttttcaacatttgcttccactccgcggatgaggtaatctgtttcaaagcctgatcccaataggcgatctcgccttcggtcatgtctttcggccccatgatgcctctccagtgcgcaaagacaaacggcaccccctgctctttccatgtcggcacatcgctgaagccggagagccttttgtccgacgtaacggccgccaatgtgattttccctttccgataggcgtctctcgcttctgaaatggtcattgaggcggcgtctatctcgtggctgataagagcttcaatgacttcattgctgctcccgtattgaaaaaagcggatatcaaacggagaaatttcggccatttccgccgctctcgcaaaggagagctggtcatcatttccgaggccgggcgcaaatccgatttttatgccgcccggatgtgctttaatatcgccgagcagccgctttccgctttttatctttgaatccttcggaagagcgacggtctgccactcttttgcgattattgccaaaggcgtaaaatcagctgccttcagccggctttgtcccaaaatttcattgcttaacagcaggcttgaattcatactgatgacatccgtttttcgttcgtttacatatttccagccgctgtctccgcctccgccgggtttatagacgatctttacgggccggcctaatatttgcttccgctctattaccgattgcaaagcttttgccgttacgtcccagcccccttgaggcgccgccgggacgacaatttcaaccggcccttcagctgaacggatgcccgccacctgccgtccgtcaaaagaaaccagcgccgccagcatgacaagaagcactcccaaccgcttcatttctcccatcccttattcatgtgctaaataatatttccgttccggcctgccgataatgccgtactctaattcagcgagcgcttcttcccgagaaacgagaaactcggcgtagcgccgcgccgttgttctggaggcgcccattttttcgcccagttcttcagccgtcatccctttttgggccgccctgagcgcgtttttgattttttgaagcgtaatcgaattaatcccggtcggcagatcattgagctgtttttgttctttctgaccgcttccgaaaaacatgtcgataacggactggctcagctccggctgtgagtgcagccattctcttttttcacggtactgcaaaagcacttctgtaaatttatgtgccgacaccggctttatgacatagtgggaaacgcctgatctgagcgcttcctgcagcagtcttgtttcggcagaagctgtaataatgatgatatcaacggaaggaaaacggccgcggataaggggaagcagatctgttcccagctcatccggcatataaatatccaaaagcagcagatcaggctgccgtttctcaagcagcgatatggtgtctttggcattgattgctttgccgatgacattgaatccatcaagatgttcgataaatttttcatgaatttgcgctattcgaaagtcgtcctctgcaatcgcgatgttaatcactccgattccccctttggcctttctttcggtataaacaccgtaaatacggctccgccgctcttttgctgcgaaatctctatcgatccctgtaattcactgacggcttctttcagattggctaagccgtatcctctccttgtcccctttgaagagtagcccttttcaaatatggtttctgttttttcctgaggcacgccatcccctgagtccgccacttcgatgacgatatccctgccgatatcagtcataaaaaaggcgacctcttttttctctttttcggcgacggcttcgaaagcgttatcaataagatttccgatgatcgtaatgagctgggatgaacccacatgttccggcagcgattctaaaaagctgttttcatctattgaaagcttcactttcttctcagacgcctttcccatttttcctaatagtatggcctgaacccgctgtgaatgaatgttttgaaagaggatttcatgctgttcattctggatggcgtactcttcttttatcagttcaatggcttcattatattctcccagctctaacagaccgagtatcgcgtaaagcttattcgagaattcatgcgtttgcgcccggagatcctccgagtattttttcatttcagtcagcttgttaatcagtttcttgagctctgttttctcccggaagctgatcaccgctccgtatacttgtccggtctgcttcatttctttcacgtttaagataaatactttatctccggcacgcacctccacgttcggcggtaattctccccctgccaacaccggcatgagatttgcgcccggcatgatttcttttatatgccttccgatcatcggttccggaagattcagcatatcagccgcagataaattcatcatggttaccgcgccttctttgtttacggcgataatcccttctttcatcgcaaggagcatcgcattgcgctccctgtacagtgctgcaatttcatgcggttcaaggccgagtgtatctttacggatgctttttgcgagcgccgccgctcccccgatgccgataagaaacaccaaacatgcaaaatagcctaaatgccgcagatgcgctttcatatctttttctatctcatcttgtaaaaactcgactgtcaccgttccgacgacttcgttatgatttttttcctccaaaataaccggggcgctcccccggacagccttcattccgtcggaaaccggtgacccgccgaacatgacggttttattttgcaaattttgattttctttcggaatactgcttcgggccgaatgaaatgcaacatgccctttttgatcagtgatgtagacggcgtgcgcgcctgcctgttctttcatttgttcaatgacgtctaactttgtaaaagcctcttgatccgcaagccggaacgcctcttttacgggaggcatatatgaaatggtttttgccatttgcaccgccagctgttcagcctgcttctggccttcctttaattgctgaaaggcaaatataactgtgagcgttccgatgacaagtattaataaagccgcaattaatccggcgattttcatttgcagagagacataaaaccgcttcgcttccaacacagcaccagccgtcctttcctcctaaaatcataccattttttaaatctttatttctcatttttgagaattttcgtgatctttttctcttgtcatttcttttaaaaagtgcagtctggtataatttccctcaagagagataagaaggataactttttataatcgctgcgcaaaaaaagactgacagaagccagtctcgggatgtttcacaacggacgtatattcagttgacaaagtgtttctctatgatggccgagatacatttgaatgacctgaaatatcaatcaattttcctttgacggccaggcgtccttcggttcttaccgccttgtcgcatgtgattaatgtaatctctttatcttttgtctcctgaattgcgtttgcttctatttctgaaatcatggtttttgatgttacagaataaatatagtcttttctaaagtcggtcatcacgatttgcgcgcctttttttatgtgtaaaagagggccgaacaataggttctcctgcttcagatggtggcctgccaacgggtagtttccctcgcccattttctgatccggacgcatagttgccgcgccgatcagcaggttttcattggttgtgccttttaaaatcggaaggtctaaatcgatgctgctgatggttatccgtccgattatcggttttggtttgcgattaaaacttgactgaactgtttccctgaaaccgggcggatgaatggattcaaaatcatagtccgcttttttcatgttatttttccgcgcttgttctgcggttaattccgattcaatttggcttttactgaggtacgcgatcaaacagcctttcatgagaggtgaggaaatgagaagcagcccggacaaaataagaacggcaatgatcatttttttaatcatgaagaaaattcctttcttgtacgtcatgcggtgagtatttggtgagaaatgattctctttttaaaaaagcacctgatcgattcttacatgatcaggtgcgataacgtctatctattccttgctttcttctttcttgatacaacagccgcggctccgccggctaatagcagcagaataccggccgtgaccggcatcataccgtccgtatcaccggttttcggcaggtttttgcctgtatccgagtgattggttttaccattggtatcagggtgatgcccgccttgattcgtttgatgattcggtgtgtctttcccaggtgcgggattttttaatttcttattagaaacgacgacctcaacggcttttgactgtcctttttcaattgtgaattcaattggtttttcgttcagctgatagccgtcaggcgcttttgtttcgataaatcgatactgcccgggcgctaatcctttcaccgtaaaccggcccttttgatccgtcttccataccgccggccgttctttgctgccgccagtgtttaccggatgtccggcagaatccgtgatcttgaattcagcaccttccagcaccttatttttatcgtcatgatccacttttgtcagtgtgacatcaccaggcgtcagtgtattctccgcactgatttcgactggttttatgtcgatatttgtgatcttgaatgatattggcgtttgatccaaactgtaaagttcaggcgcttttgtttcgataaattgatattcgcccgctttcagtccccgtacaataatttgtccgtgctcatctgtcgtcagaccctctgtcagtactttgccgtttgcatctgtcagattaaactttgcaccttgcaggactttccgtttgtcaccttgatccaattttgtgagaacaacgctgttcttgatgttaactgcagtcagggcagcctgattcggttttccgctgttctcagccttaatcgtaaacggcacaggggttgttgacagcagataaccatccggcgcttttgtttcaacaaattgatagtttccgggcgccaaaccgccggcgtcaattttgccgccttcttttgtcatcagatcgtctcttacggtttttccatcactgtcaatgattttaaattctgcaccgtctaaaacgtttccgtcttgatccttcttgatcagctggacagagcctttatagttgactgccgttcctgcgtcagttgactccggctttccttccgctgtttctgagatggtaaactcttttttctccgtatttaacacataaccgtcgggtgctttcgtttcaatgaaagcgtaatgacccggtgcaagaccggacgtttctacttttccgtccttatctgaaaccagatcttctttaaccgtttttccatcactgtcgacgattttgaagactgcaccttcaagcttcttgccttccgcatcttccttcgtcagccggacagagcctttatagttgacggccgttcctgcgtcagttgactccggctttccttccgccgattctgagatggtaaactccactttctccgtatttaacacataaccgttgggcgctttcgtttcgatgaaggcgtaatgaccgggtgcaaggccggatgtttttacttttccgtccttatctgaaaccagatcttctttaaccgttttaccatcactgtcgatgattttgaaaactgcaccttcaaggtttcggccttccgcatcttccttcgtcagccggacagagcctttatagttgacggccgttcccgcgtcagttgactccggttttccttccgctgtttctgagatggtaaactccactttctccgtatttaacacataaccgtcgggcgctttcgtttcgatgaaggcgtagtgaccgggtgcaaggccggatgtttctatttttccgtccttatctgaaaccagatctttctgaaccgttttaccatcctggtcgacgattttgaaaactgcgccttcaagattcccgccgtctgcatctttcttcgttaaagcggcttttcctttataattcaccattgatcccaattcaacatcaggtacttgattcttttcgttctttgcgattgagaagtgaatagcttttgtgtttacgataaaccctgatggggctttcgtctccatcagccgatagtatccggcgggcaaaccgtttatctcaactttcccatttttatcgctttcaatattattttttatcagagtataggtaccgtcgcttgattttttctcaagcttaaatacagcaccggccaaaggattattgttttcgtcttttttgataagcgtcaccttatttttttgatttatgactttatagagtgctcctgctgcggaggatttaccgtcaatcgtaacggagaccccgtttacataggcgtcgctgatggtgtagccgtccggagcttttatttctttcagtacataggttccgtaacggatattcccaaacgcaagtttaccggcatcgtctgttgtgcccgtacgaagcagctgcttgccgtctttagaccataattgaaagtcggctcctgaaagagatgttccgtctgatcctgttttagatatcgtcaggcttcccttctctcctgatcctgagccgccgccgcttgaaatggcgacaaacactgagctgttgttctcttgggtctgctcctcaacatttgtccctgatatcgacactttgttgctgacctgaccgctgctgccggaaatattaatgagagaacgatattgtatgacatacgcacggtcgatttgtttatagctgcctgtaaaggtgaggacaaatgattgttcaccggtggcattgtcagtttttatatctaatttatagtccttatctttttcaagcttcacatcacccggaataagatttccgctgctgtctttcataacgccgctctcattatattttgcttgatatactttaaaagaatcttcatctattatttgattctcatccggggtgtctttgacttttacgtcatccagtgtcgattggctggcattgacattgatgttccaatcgatatagtttccgttctgtttgccgcctttagaaatcaggtttcctccgtttgcgatggaaactgaacccgtcagcgttcggtctgcatggtcattattaaagtactctgctttgtttgtgtattgactctgtttaatgacctggccttttaatgacgttttaaattcaatcaggtatggtaaagcgtcatctgttttgagacgtacgattaacgtatttttgttgccgtctgacggctcctctatttcatattttgaaggatccagcgcctccccttcagtgatggagccgtttttgctgatggtatacgttttaacagcaaccgacccatgcaaaaattgctgaccatctgtgatcgtatcttttatataaggattttttgaaggttcgccattgtaattaatgccgactttccatgtgatttcttttgaaacggcgttgtatgagccgtttttgaatccgttatgggacgtctgattgttcggtgtgaagccgctcgattccttatttgtgcgtttgccgccgtttttatccgtccatgtcgactccgccgtattcttaatgggttcgtttgaaaagtcagcgttgaattttgtcttatacgtgatcttaaactgactgtttgtttctgcataatccccgatcaatgctattgtaaagccttgatttccgggtttttttgttaatatatagtctgttccttctttcagcgttttgttatcagtcgtgtcttgcatgtgaaatgaatcgtcaatgagcgccaggcctccgctggtgaattgatcatccagcgtccagtctttcattgtgtaaccgtttttattaactgtgattgtccaatcaaccgtcttcttctcatagtctgcatttgaataatttttgatcagattctgctgaatggcggttcccggagtttcctttgattcccctgtatctgtcattgctgtattggtgtatttgacaggactgtcaataatgaccccatcgttgacttgagattgataaatgatcttatatgctcctgtgacagtttgcttgaattttatttcaaagccgttcccgttatcagtcagcgtataatcctcaccctcttttaatggggcgccctcttgttcactgccgttctggctgaatgtaatcggaaggactttcaatgaaccgggaacaagatgcagatcgtctgatccgaacgtatccttgatgccggctttggattgatcaatctttttctcaccgtagttgtacataacagcccagctgaacgtttgggattctcctttataacctgtcgaagatttttctatcatttttccgtaacccgctgttacggaagcttccgcagaaattggctccgcattgtctccgctgaatgccgccttgtttgtcagcgtgatgtttccgcctttacccggctttgcctcatctttaatttccgtgtcatatatgagccggtaggctgaatcgatcgtcccggcgaaggtgacattaccgttttcgccaacggtataacctgaagttatctcatttccctgactcaccgagccgtcaatattcacatcaagttcatacactttcacagagcggaaagtcaattcgtccggaaggctttcagtcaatttcgcatttttaacttcttcttcctttttattaagatcaaccgtccacgttacctttccgggattaatacctttatccaatgaccctgatttctcaatggttttattgacattcggtttaaaataaaccgttacgtccggcgtatcagagttaaccggaaacttaatcttttgtgtggttgatccttttatttctttctgattgaattgggtgtttacatacaatgaccccttgacgttagtatcttcttttacctcgccgttaaacgtcatgatgacatggccgctcgtattaatggaaaaagttccgtacgtactatcgccgtcggtcaatggctggttcgtaatgtcattatgcatgataaattctttaggcagatcaaattcatatcgatcaccgtcgtttattgttttccccagctcattcggaatcgcccattgaatggtgatatttgccggagagttcgtattcgcagggttgtttttgtcatatggttttcctttttcatccgtcaatttcacatcagttaaaatattttgcgtaatccggcttccgcctgattgaaggcttttagcggcagatttgcttgaaaccgccatttttgattgactgcgtttagcagaaggttttgatttcgttttctgttctgctttatcaccgccgtccgcagatgctgattttttctctgtcttttcctgaggttcagcaggtgttgaagaggtgtttttttctgtttcggaatccgttgttccgtctttcttcacaggtattaacacctgctgggtcttgccggcatccagttgaaaaagagcttttgccattttcgtctcatctgttatgtcgggagtaaacttcgccgacagtgtaatggagcctttggcatccccggcatctgcttcagcatcgttcactttcacttccagcgtgctgctgtctgcttcagctttatatataccgatcacccgatcagctgatgtcagctcaccttcggcatcgttatctaatgtaaaactttccggaatctttaaggtgatattccggtcacttgcatcttccttgttttttagcgaccattcgtatgtcagtgtcactttatctcccggtgctaaagcgggctcactcccttttgacccgtcaacagtctgctgtctgccgtctttgactgcaactgaatcaaagaacccgctctcgctttgttgtgatccggaagcggctgcgatcggagtaaagctgacaacttggctgaagatgaaaaacagcgtaaagcatgaaattaatgccgccctcagccttttgctttttttcgggctgaacgaaaagttcctcactcccaatgtcttattcctccccttttatatagacttacgttcgaacaagccggtaagcatgggattctccttatccgaaccaaactacattgtatgaaatcggcctatacaaattctgtacatgggattatttcagaaataacgcacaaaaaaagaccggcatcagccggtccggtcattcaatcgtcaattgattttatccttcaattgtttatagcgttcgtattcctttatcgcctcttctacctttcccagtttattaaataactgcagtttgtattgtataattttatcgtcaccgggctctattttctcaacctgcaggcaaacatccatcgcttgatgatcgttcttctcttggatgagaaaaccaatcagttcgtacgctttgctgagccacagatgggccagacgcgctttttccggctccgcccacagatagccattctccatgagataatggttctcatatgacatgacaatgtccaggtgccgggttagtgcagctgcgctgaccggaggagcctcttttaatgttttttcccattcaactgtatcaacctttactccggaaagccggagaatgtatcctatatcggtattttctattgattggctgaagggcagctgaccgattaatttccgtatttgatatattgtcgaatagagctgggtgcttgcttttgatacatcataagcaggccaaaacatctccatcagcatgtctttactgaccgtacgcccttgattaagaagtaaaaatgcatacagttcacgggctttggatgttctccacttgactgttatgtatgttttgacaccatttaccgattgataaaagtccaggttcccaaaacattgtataacataatccgtcccggtattctcgtctgccgacctgagttttttattcattcggattcgctcaacagttgtcagcagccgggcatggtcaaccggttttaaaagataatcgacagcatttaattcaaacgctttgatcgcgaattcattataagcggtgataaaaacaacttggatattttcattgacctcctgaatcgattcagcaagctcaataccgtttatcacgggcatttcaatgtcaagaaacaccgcatcagctgctgaaagctccgaatgctccagaacttccgccggatcttgaaacgttataatagattgaaatgcgtttgtccgctcaagcatacgattaaaatgaagcaatgccagttcctcatcatccacaattaacgctttcaaaccgcatcccacccgtcaatatagatatatctgaaaataatttcaattataccatgcctaatgccctatatagttggattctttttctttctcttgttgtatcataacgtttgtgattacaatatttatacattacataggataatagaatgcccctgaatgggataaaggagtaatgatgtgaaagaaaaatttatttcgatttcgattatttgcggctacgctgctttctttatgctttttatggtcctgaatcatttttcaggatcatccctccctcaagcggaacagggcgtgatcaatctggaaaagtgggattttcaaaaggatggaaatgtccagctgaacgggaaatggattctatatccaaatcagatgctgtcaccgcaggcgcttcattcagcaaaaggaaaaaaccccgtactcgttgatgtccccgtcaatgtgaagctgttcggcaaaacggccgatgtggattacgggacgtacaaactgacaatccgatcaaatgaagacaatcaggttttggggatcagcacatcttatatctacagttcaaaccgcctttatcttaatgggaaattaatcggacagagcggcaatcctacagaaaaagctgattttaaggcgcagaacaaaccgtacagcagctttttcaggcttcacaagggtgacaatgaacttgtcctgcatttttcgaatttcggaaaagttcccggctgggggatcgcaaaaccgataacgtttgggactcaggaacaaattatacgcgagaatcaaatttccttttttaatgattccattatgattacggcttttttcattaccggtttatattttctcggcttttttttgcaacggacaaaggataaacatttattgttcttttccgtgatgtgtctgcttttttctgccattattcttatgatagggaaagaaagaattatctttctcctctttccgtctatttcattttcattgctgaattccttgcgtatcatctcaaccgtgcttgtcagcatggcggtttttctttatctcttttatgcatacagagaaattgtttcaaaaacgacgatcacctttttaaccgctttatccgggattatcttgatcactgattttatgtccggaagtttcattgaccatctctcatacattttacattctgtgcttgccgttacgactctgttttatattacatatatttttacgattgccgccataagaaaaataaaaggaagcacgtaccttacactcgcatccgtctcgatgagcgcttttgtgattcttactaccatttcagcttacagcggcaaaacggctttttcttttaattcgctctattcattgccgacagtcatcgctttattggcggtggttcttctgatggcgcagcaattcgccggagctttccgggacaatgaagtcctctcacggaaattagtcaaaatcgaccaactgaaagatgaatttatcgccaaaacttcacacgaattcaagacgccgctgaacagcattattaatatatgccaaacccttgtagccggcagaaaaaagaagacgatagaggaagagaaagaaaatatgcagctgatcatccgtatgggctacagactttctgatctcgtaaatgatattcttgacttggaaaaaatgaagcagggtatgctgcagattcgtccggttcccgtcgatgtgcatgccgtcatatgcagtgaaatgaacttctaccggcttttatccaaacataaaaaacttgccattcttaatcatgtgccggacggcctccctttggtgcttgcagatgaaaaccgattccggcaaatcttaaccaatcttgttgaaaacgcaatcaagtacacatccgaggggaacattattctttctgctgaaagcctgaatgacaaaatgattcaaatcacggtggccgataccggcagcggcattcctgaggctgatcttgaaaccatttttgattcttttcagcaagcgggagggacggaagaagatggaacgggtttaggtttaagtattgtgaaacagctcgtcaagctccaaaacggggacatctgggcggagtcagcggcggcgcaaggatcagcctttcattttacgttacccgccgctcaaattgattctttaccggaagcaaagaccgaacttcctgaatcacatcccgggcagagaatgtcggatatttcgctggtcacgccttattactcagaaaaaatcgatgctccgacgattctgatcgtcgacgataacatcgagagtttgaaaattttaactgatatgctggaaggtgttccttataacgtaatcgcagtaaaaagcggaaaagaggcgcttcaagctgtctcttcctcgaagcttgacttggtcatattagacttgatgatgcccgacatgacgggttttgaagtctgcacaaacatccgcgaaagattcagcatggtcgatctgccggttcttatcgttacggcagccattatcagccatgacaaatacaaggcgtttcatgccggagcaaacgacatcttacaaaagccttatcattactctgaattcaccgcgcgtattaaaaatttaattttgatgaagcatacggctcaccaagccacaaatttagaaatggcatttcttcagtcgcagattaagcctcattttctttacaacgtattaaatacgatcatcgcgctcagccatttggatattgaaaaagcacgggaaaccactgctgcatttacaaactatttaaggatgagttttgattttcaaaacacttcggacatcagctcattcagaaacgaactttctatcattacgtcatatctttctatagaaaaaacacgcttcggcaaacggattgatatcctttttgatattgaacaggacattgacttcccccttccacctttaatgatacagccattggtggaaaacgccgttcatcacgggatcagtaagaaaagaggcggcggacggataaagctgacagcgaaaaaacaaggcgaaaacacgtattttatcaaagtggaggataatggaaccggcatcatgccggacatacagaaagatattttgtcttctgatgttaatcgcagtgtcggcctgaaaaatatcaatcggcggctgaagcatttttgcggaagcgaattgacgatcaccagcaccccggatgagggaaccgctgtttcgatgatgattcacactcccggcccaacggatgatttgatctcactaaaaacgtcttcattaagatactgattaacttcaaaaggcatgtaaatacttctgccggctgtcgggaaattcccgtcagcctttatttacccaaaaagacgcaaaaacaaaaaagcttgaagaaaaagtgatatcttctccaagcttagatgatccgcaccagtctggccgttttcacttaagaaatcgtaactcccgcgcttgcatatcccgccactgtattaataagcgaaaggcctgtcgcagtggcggagaataccattaacagccgggtttgaggagttaccgcaatgttcagccctgtcgtgattccgttgctgatgctgccgattgacaatatgccggtgaggggaggagctaaagtgacggatgctccggggatcggcgtgaacgtattgttcggcactgtggaactgtataattgtgcggttatcgtaacagtcgagccgacaagcgacaatgctgcggttgtactgaaataggcggcaattgatgtaatggttccgcttctcggagccgaaaaagcaaagttcagcagagttcctccagccccggtaagatcaattgcacctccccctccgacattgacgcccgtcacagaattgccgaagccgacaaggctcaccgttccgattaatccgccggcaatggtcgtcacggcagttggaagacctgaagcatagggaatgatcgcgcctgctccggttactcccgttaccccggttgctccagttgcgccggttactcccgttaccccggtggctcctgttgctccagtcgaacctgttacccctgtggctcccgttactcccgtggcgcccgttatcccggtggctccggttgctccagtcgaacctgttacccctgtggctcccgttactcccgtggcgcccgttactccggtggctccagtatctccggttactcccgttaccccggtggctccggttaccccggttactcctgttgctccggttaccccagttgctccggttactcctgttgccccggtcgctccggttactcctgttgcgccagtatctccggttactcccgtggctcccgttactcctgttgctccagttgcgccggttactcccgttacccccgttactcccgttaccccggtggctccggttgctcctgttgccccggtggcgccggtgagcccggttactcccgttatcccgattgctccggttactccggttgccccggtggctcccgttatcccagctgcgccggttactccggttgagcctgttactcccgttgctcccgttattccggtcgatccagtagctccggttaccccggttgctcctgttactcccgttaccccggttgctccggttattccggtggcgcctgttactccggttgagcctgttactccggttgttcccgttactccagttgcgccggttgctccggttgctcccgttatcccagtggctcccgtatccccggttacccccgttactcctgttgagcctgttactccggtggcgcctgttaccccggtggcgcctgttaccccggtggcgcccgttattccggtcgctcctgttactcccgttaccccggtggccccggtaatcccggttgctccagttactccagtatccccggttacaccggtagcacctgttactccggtgagcccggttgctcctgttaaccctgttgctcccgttacaccagtggctcctgttactccggttgagccggttactccggttgctcccgttaccccggtctctcccattattccagttgcgccggttactccggtcgctcccgttatcccagttgcgccggttactccggttgttcccgttaccccagttgcacctgttactccggtcgctccggttactccagtggcgccggttactccggttgctccagtatccccggtcgctcccgttaccccggtggctccggttattccagtcgcgccggttgctccggtcgagcctgttactcccgttgctcccgttactcccgtggcgccggttgctccagtcgcgccgggatctccagtgacgccggttaccccagtcgctccggtattcccagtcgagcccgttgctccagtgaatcccgttgctccagtaaaccccgttgctccagtgaaccccgttgctccagtcagccctgttgctccggtcagccccgttgctccggtcagccccgttgctccggtcagccccgttgctccggtcagccccgttgctccggtcagccccgttgctccggtcagccccgttgctccggtgaatcctcttacatgaaaatgatttggatgacagcatggacaccatctttcatgacagcaagaagttttgcaacagaattcttcacagcaatgggcccgattttgataactgcgcctttgatttcttcttttatgttgaaaatgacagcaacactcattactattccggcagtcgtaatcccaagagtcgtatctgttataccaagtatctccttttctcattacaccacctctatttgcataatatttccacaacaaaaaaaggtgtggcaaaatcccacttctattgggcaaatttttaaatgttctttaaggctgcatcatgcagcatttacagaaaaaaagacctaactttgcataagtcaggtctttcatctttaaaatatcagactgctattttcatgaggttgtcggaaaacttatgctgttaaaatcgatattgagagcagttgctgtcgttaaattattagcagttgtgaagataaccctgagctggtaagtgttcgttcctgcggtcggcgcagtatccactactgtatcagcaatcgaaaaactatccgtagctgcgatagtactagttcgcgacagagttcttgtatgaatttgcactgctcccctatataatctcacttcataaacaaagtttgaattggctgcagttgttaacgcgacactgagtgcataatcaagctttacattctgcaaagcattaaccgggactgccagcgtagcaacgggaacttctgtatttaacggcggataaacagtgagcggcccgttggttcttgtgaagagcaaggttggtgtactgcctgtggcgccggttgggcctgttactcccgtggcgccggttgggcctgttactcccgtggctcctgttgacccggttgctcctgttactccggttgggccagttgctccggttggccctgttgcgccggtcgatcctgtggcgccggtgagcccggttgctcctgttactcctgttactccagttgcaccagttgctcctgttactcccgttgctccagtcaagccggttatgcctgtcgatccggttgagcctgttggccctgttgcaccggttgggcctgtcgctccagttgaaccggtcgctccggtggctcctgttactcccgttgcaccagttgctcctgttactcccgttgctccagtcaagccggttgggcccgttattccagttactccggtcgctccggttgagcctgttggccctgttgcaccggttggtccggtcgctccagttgaaccggtcgctccggtagctccggtgagcccggttgctcccgttactcctgtggctcctgttgctccagttagtcctgttacaccagttattcccgttactccagttggaccagttgctccggttgaacctgttacccctgttgccccagtcactccagttgcacctgttgatcccgttactccggtggctccagtcacacccgttgaaccggttgggcctgtcgcgcctgttattccggttgtaccggttgggcctgtcgcgcctgttattccagttagcccggttacaccagttgcgcctgttgctccggttgagcccgttattccggtcgctccggttgaacctgttatacccgttgctccagtcactccagttgctccggtttctccagtcggtcctgttgatcccgttactcccgttgaaccggttgcaccggttgctcccgttgccccagttactccggttgagcccgtggttccggtttctcctgttgatcctgttgcgccggtttctccggtttctccggttgaacctgttgctcccgttgctcctgttggaccagttgctccggttgaacctgttacccctgttgcgccagtcgctccggttatccccgttgacccagtcactcccgttacaccggttgggccggttgggccggttgagcctgtcgatcccgttgctcctgttacaccagttgatcccgtgaccccagttgggccggtttctccggttgaaccagttgaccctgttggacctgttgctcctgttactccagttgatcccgttgagccagtcgcgccggtttctccagttgggccggtttctccggtcgaacctgttacacctgttgggccggttggaccggtctctcccgttgggccagtttctcccattgcaccggttactcctgttgctccagttacaccggttattcctgttgaccctgttacaccagtcgctccggttactcctgttgaccctgttacaccggttgagccagtcgctccggttataccagttgcccctgtcgctcctgttgaaccggttgcacctgtgactcctgttgggccggtttctcccgttgagccagtcggtccggttgaaccaattgctcctgtcactccagttgcacctgttatcccggttgagcctgtgaccccagttgctccggttgagccagttggtcctgttacaccagttattcccgttacaccagttggaccagttgctccggttgggccggtctctcccgttggaccgatttctccagttacacccgttgcccctgttgggccagttgatcccgttactccggttgcgccggtttctccagtagctccggtatccccggtcgagccagttactccggttgccccagtcactccagttgcacctgttgatcccgttactccggtttctcctgtcgatcctgttgctccagtcactcccgttggaccggtcgatccggttactcccgttaccccagtcgctcctgttgttcccgttgctccggttataccagttgggcctgttgcgccggtcgctccggttatccccgttgcccctgtcgctcctgttgaaccggttgaacctgttactcctgttgagcctgttgctccggttgatcccgttattccggtcgctcctgttgcaccgattgagcctgttgctcctgttatccccgtttctccagtcactccagttgctccggtttctcccgttgctccggttgagccggtttctcctgttaagccagttgggcctgttgctccggttgaaccagttacaccagttgggccggttactcccgtcgccccggtttctcctgttgctccagtcactccggttgagccagtagctccggtatcccctgtcgagccagttactccggttgaaccagtcactccagttgcacctgttgatcccgttactccggtttctcctgtcgatcctgttgctcctgttattccggttgagcctgttgatcccgttggaccggcctctcccgttgggcctgttgatccggttacacccgttaccccagtcgctcctgttatccccgtcgcaccggtttctcctgttacacccgttggacctgttcccccggttgcgcctgtttctccagttaatcccgtcgcaccagttgagccggttgcgcctgtcggtccggttgcacccgtttctccggttgggccggttgagcctgttgggccggtttctccagtagctccggtatccccggtcgagccagtttctccggttgcaccagtcactccggttgcaccggttgaacctgttgctccggttgagccagtcgctcctgttacaccggttgggccgattgatcctgttggacccgtgattccggttgggcctgttattcctgttgctccggtttctcctgttggccctgttgcgccggttgggccagtttctcccgttgcaccggttacacctgttgagcccgttacaccagttggacccgttactccggttgagccagtttctcccgttgagccagttgagccagtcgcgccggttgaacctgttactcctgtggatcccgttactcctgctgggccagtttctcccgttgccccagttactcccgttgctccggttactcctgttgctccagttgctcccgttgctccggtcgctccggttgagcctgttgatcctgttactccagtcaaaccggttgaacccgtggtcccggttgctcctgttgatcctgttgagcctgttggccctgttgcgccggttggtccggttggacccgttaggcctgttgtacctgttgacccggttgcgccagttgcacctgttattccggttgagcctgttgggccggtttctcccgttgaaccagttacaccagttgagccggtttctcctgttgcgcccgttgctccggttggaccagttgggcctgttgcaccagtcgaaccggttgttcctgttactcctgttggaccggtttctcccgttgccccagttactccggtcgctccggttactccggttgaacctgttactccagttgatcccgttactcccgtcgctccagttgctcctgttgaaccagttacaccagttgggccggtttctcctgtcgccccggttactccggttggacccgtgattccggttgggcctgttattcctgttgctccggtttctccggtcgccccagttactcccgttgctccagtcacacccgttgcaccggttgggcctgttactcctgttactccagttgatcccgttgcgccagtcgctccggttgaaccggttacaccagttgcgcctgttgagcccgttgcaccagtcgttccggttactccggttccacctgttgcgcctgttgagccggttattccagttataccagttgatcccgttggacctgtttccccagttacacctgttgggccggttgggccggtttctccagttatacctgtcgccccagtttcccctgttattccggttgtacctgtcactcccgttggtccagtctcccccgttggaccggtcgagcctgttattccggtcgctcctgttgttcccgttctcccggttacacccgtgaccccagtcgatcctgtcgatcccgttactcctgctgggccggttactcccgtcgcaccggtttctcctcttgctccagtcactccggttgagccagtagctccggtatccccggtcgatccagttactccggttaccccagtcactccagttgcacctgttgatcccgttactccggtttctcctgtcgatcctgttgctcctgttattccggttgagcctgttgatcccgttgggccggttgatccggttacacccgttaccccagtcgctccggttgttcccgttgctccggttataccagttgcgccggtcgctccggttgagcccgtggttccggttactcctgttggccctgttgcgccggttgggcctgtcgatcctgttgcacccgtttctccggttgggcctgtcgatcctgttgcacccgtttctccggttgggcctgttgagccggttgggccgatttctcccgttacaccggttgcgccggtttctcccgttgccccagtttctcctgttgggccagtttctcccattgccccggttactcctgttgctccagttgcaccggttgggccggttggaccagttacaccattcactccagttgcaccagtttctcctgttacacccgttggacctgttcccccggttgcgcctgtttctccagttaatcccgtcgcaccagttgagccggttgcgcctgtcggtccggttgttcccgttcccccggttacaccagttaccccagtcgatcctgttgctccagttactcctgttgggccagtttctcctgttgatcctgttgcgccggttgggcctgttattcctgttgctcctgttgggcctgttattcctgttgctcctgttgggccagttattcccgttgcgccggtcgccccggatgcacccgtcgctccagtttctcctgttgaaccagttacaccagtcgctcctgttggaccggtcaagccggttgggcctgttgcaccagtcaagccagttgttcctgttactccagtcactccggttgagcccgtagttccggttgctcccgttgcaccagttactccggtcgctcctcttactccagtcactccggttgagcccgtagttccggttgctcccgttgcaccagttactccggtcgctcctcttgctccagttactccggttgagccagtggttccggttgctcctcttgctcctgttacaccagtcgagccggtagctccagttactcccgtcgcccctgttactcctgtcggaccagtcactccggttgggccggttacacccgttgatcctgtcgacccgattgagccggttactcctgtgggacctgttactcccgtcgcccctgttactccggttgatccagtcattccagtcgacccagtcgctcctcttgctccagtcactccagttgagcccgtggttccggttgctcctcttgctcctgttacaccagtcgagccggtagctccagttactccggttgctccggtcgctcctcttgctccggtcactcctgtggggcccgtcactcctgtgggacctgtaattcccgttacgccaggttcacccccggtttgcgccaatgaaacatcgtctattaaaaccgttccggaagaaactttacttactacaatgacggcaaaggccgcgccagaaggcacagtacttgttttatagatttcagaccatgtgtgaaagagcacgttcggcaaatttccgggtgtaatattttcttgaatggaactgatttgttcacctgctgcgctgacatatatgatctggagagtgacttggggacttggctcatttccgagcgttgcgagtgatacgaatagagtcactgacttggctgaaatgggaacgatttgactgaggtaagcatatggctgagctccaataaattgcgcagaatatctccctgaatgtgcaaacaaactgttaatctgggtatttgccgaactccaccccgctaatgtgccggtttcaaagcttccgtttataatcggattattcattcaatctttttccctctccttcccgttgttgaccgtcttacttattaagacagcatattaatacgggctgtgttttgacaatctaaataaaaaaggtgatttcttttcatcaccttaatccgatccttgaatggggaatcccgtcgcaatgagggagcggtttgccgctgcgacttgtgttacgtaattcgaagaaaggacggataaatagagctgatacgcggctgtttcatccgccttcatttcgtcgatgtacgtaaaaggaattcctatgatttgcccgcctgaagaaaagaggttccgctcttgtctctgtgtttgtatcgatacgccatttctttgcagctcgagagctaagaccaatgagaaatgagacgcgagcggatctaattccacatttacttgtatgacggcatccgttttcaccaattgatctgtcggcgcggctatcactgtgcttaacacgtttatcggtgttccttctaacggaatcatcatctggtctgctgtattttgaaaagctacagccggaaccgctcccggcggcccctcaggccccgggggaccgggcggacccgcctccccttgcggaccgcgggagccggcgggtcctcttttgccttcgggacctcgcagcccgggtacgcacaaggcagatcgattttcatctgaagacggaaaccgtttttccgtccctgtttccggcctttcatgttcacatggtaattgttcataccggtgtttcatatgtctgctcatatatttgtaaggtttctgtttcaatatcatgtattgattacggccgctgctcatattatcaccccggccatattctattcgcactggagtcatcatgtgcaggcccttccccttccttacagaaataaaaaaaaggcagacctgagtctgcctttttttcttctaccataaccctaatactttccaccataatccgccgatcacaagccatgtcacaatatggacgattgacaggataaagccgatggaccaccatttgctttgcgatatataacccgctccgaaaaagaccggagctgctcctgagccgtaatgcgtcgtcgaaccgaaaaggttgctgaaaaacgccaggctgagcgccgccaacagcggcggagcgcctgccgccacgatgacggcgagaaatgccgcatacatggcgctgatatgcgcggttgcgctcgcaaagaagtaatgcgtgtaataatacacgacaatcagaatcataaatgccacaatccatgaaaaaccggaaacagaagatttcatcatattgctgaaccaagacaccatgccgagctcattcaggaaattcgccagcatcacaagcgccgcgaaccaagtcagcgtatcccatgcaccttgttcctttttgatgtcctcccatgttaatacctgtgacaaaagcaaaacggataatccgatcagggccgtcgtcgttgcgtcaatatttaagcttcctccgaaaatccacagcgcaagcaccaatagaaagacaatgaccatggagagttcggattttttaaacggacccatttctttcaatttttccgttgcgattttagccgcatccggtgtttctttaatttccggcggatacagcttataaatgacgagcggcgtaatgattaagctcgccaatcccggtacaatggctgcgattgcccagcttgtccatgtgatgtccacccctgcgacatcgtgggccagcttggcgatcagcgggttcgccgccattgccgtcaaaaacatcgcagacgtaatcaagtttccttgaaaaccggtttttaataagaaagcgccgattttccgctctgttccgtctgccggcgttgatccgaaagtttcggataatgatctgataataggaaaaataatgccgcccgcccgtgccgtgttgctcggaatggcaggtgataaaattaaatcactgaaaagcagtgaataagaaaggccgagtgttttcttcccgaaccgttgtacgaatacgtaagaaatcctggcgccgagcccggttttgataaatccccgggaaataaaaaaggcgatgacaatcagccagattgtcttgtttccaaatccgcttaacgtattttcaatagatagcgttcccgttaacgcggtgactgccaatgcaaaaattgcaattgcgcccattggcaagggcttggagataaagccgataattgttgcgacaaaaatagcgaacaaatgccatgctttaggttcaagtccggacggcgcgggaataaaccaaatgattaatcccacagcaacagtaataagcaaaggaatgatttttactgcctgctgtttttttgcgtctttttctgaagccattacaggtctcctcctattttgttgtcttccatcccctatcccattttactacttaactaagttaataaacgtttttgttaattaaaaaacacaaaggaatattttcctttgtgtttcttgtttcttattttaatatgcccgacccggctttagatataacatctgattttacatttgatgatgagccgatggaaccgtgcaatgacggtgtccagccgacggactgacttaatccgttggcggccgacgcgttaatggaggagccgtttaaaagagtgccgtcttcatgaagcgcttttccgccgctgaagacgctgatgactttatcagcagccagtcccggcacttcaaaaacattattctgggcatatatttttgacgcgcggcccgcgccccacgcatagctgaacgggtatgcagcgcttttcgagcctgcgtaaaaattattataaatatgaacctgcccgtaccggacccgcggcgcgcgctggacgatgttctggtaatagttatggtgaagggtcaccttcagttttccctcatccgacgtcttgctgtcgctgtttccgatgacggagcctttgtcatggtcatgatatttattataggacaatgtaatataattcgccccgttggctatatccgtctggccgtcatggtgctgatattttctcccgtaatagtagggaaaaccgctgtcgggattcgatccgtcattaaaggtgcaatgatcgatccagatgtgcgtcgcgccgttaatggtgatattgtcatattccgagttccagttgccgctgctgccgtccgtcgggtcccattgcggaaaatagtcgtaagcgtcttgaaattcaatgttgcggatgatgacattgtcgacaccgttcttaatattaaaattcccgcctgtcactttggcatttgaacccgagccgatgatcgtcgtatttgaaggaatgtcaaccacgacccgtgccttctggtttttttgcgatcgctgtctggcgtcttcctgggtgcctgacggcgctttttttccccatttgtccgggtcgtacgccttcagataggcgttcggatcatatgccggatctttataatcatcaaagccgagcgttttattgcggtcgtccgtattcatattgattgtgccttgtatgtaaataatcttcggtgtgctgttggcgcttccccctaatgcagaaacgagctgctgtctgtttgatacggtgtatacattcgatgaagaggctttcgcgccgccggttgtcccgccggaagcggctccccagccgtcatttgttcctaacgtctgccgtcccagatcagcggcatagacgtccgcagggatcatacataaacaaaccgccagcataaataacatttttttcatgaattgtgctcctcctgattctttgttccaatttattacagatgaattgtatcaaatcagttgagaaacagcaccgaaaatgtacagaatgtgccttttggttttattgcggaaaccgcaaaaaaatcccaaggggccgaaaaccccttgggatctgttcagcttacgcccatgattttactttttcgttatccgtgacaaacagaagaacttttccttcatctaagcgcttttcaaattgtgatgcttcctcttccgaaaagccgatttcgtgaattttgttgcggagctcgtcgccttttttattaaacatattgccgactgcgtgtttaatgcccgtttctttcgctccgatggtattgacatcagtgttatcggccaggcggtccgttctgtcgtcatcatgtgaaagcacatatacgtcttcttttgcgacacccaattgctgaagctcttttacgtcctgcatcagtttttgatcatttgtatattctcttactaccggtttcattgataagtcctcccttttgttttgtatattggatgtttacccgatcaatcaaggatcaaacaaaagaaagagagttcagtgggaaaacgggcagattgtcggtggatattttctggcgggacatgttacagtagaaaaagcaacttttatcagaaaaataaaaatcttcttgagccgattaagcagggaggtggttcctattcattacttttcaccggaacagcgatttaacgcttgggttgtcagtgatttagtgaagcaggtattccgccggcatacccgctgcccggatggaataaaagagcttacggcctttgctgaagatacttttcatattaatatcgatttcgttttctctatcattatcaatatcggtgatatcgaatccgttctgccggcagaaattgaaaataggctgggttcttatctgaccgcgcttcagcccgtgattaccgctgacatgcttcattcttcaaaaacgaatgcctatgaatatttggaacatgagaaaaacaccgatgtgtatcggttattctattaaatatgcatataaggaaagaagggccctggtccttctttttttatggccgctgacggtttgattttgtaattgggaaatggttcgtgttacatttggaacaaccacttatcttgaaggaggattcagtatgccgaatcatcagcagcaaattcaattggcaagacgccccaaaggcgttcccgcccatgacgatttccgctttgaaacgattgccgtgcccgaaccgaaagacggcgaagtgcttgtgaaaacgagttatgtgtccgttgatccgtacatgcgcggacggatgcaggatacaaaatcatatgtagagccgttcgctttagatgaagccataacaggcggagtgattgccgaggttctgacagacggcgataagctgaaaaaaggagatgttgtgatcggaaatctcgcgtggcaggaatattcagccgtcaatgagtccgccctccgcaagttggatacggatatcgcacccgcccaggcgtatctcggcattttagggatgaccggactgaccgcttacttcgggctgctcgatatcggccgtccgaaaaaaggcgaaaccgtcgtcgtttcaggcgcggcgggcgccgtcggctcaacagtcggacagattgccaaaatcaaaggcgcgcggattgtcggcatcgccggatctgatgaaaaaattgcgtatttgaaagaggagcttcaatttgatgaagccattaattacaaaacggcggatgatattcaaaaagcgctggaacaggcatgtcctgacggcgtcgatgtctattttgacaatgtcggcggaccgatttcagatgcggtgataaacctgctgaatgaattcgcccgcattccggtatgcggagcgatctcatcgtacaataccgaaagtgaagaagaagacatgggcccccgcgtccagccgaagctgatcaaaacaaaagcgctgatgcagggattcatcgtcagtgattatgctgatcgcttttccgaaggtgcgaaacaattggccgaatggcttaaggatggaaagcttcattatgaagaaacgattacggaaggattcagcaatattcctgacgcattcctcggtctgtttaaaggagaaaacaaaggcaaacagatcatcaaagtcagtgatctaagttaacatgatgatgaaaaaaggagggctttgtcccctccttttcttttttttttcggatcagccgcgaagaatcaaagtaagaaagccgtcttcatcaggctccgtatcttccaaagtgaatcctgctgcttgaaagcaggctaaactgatttgattgtctttttcgatgcttgccgcccattcccgcacgctggtaaacccagggtcagtcagcagtttttgcaagatctgttttccgtacccttgaagctggtacaaaggattgacgatcaatccgatatacgcccgctcctccacaaactctatagagaccatgcctcccggaagctgcccgttatatgccataaggacagtatcgtcttcatctttactcaatcgtgcataccacgcgtctaatggcagcatcgcatccattctccgtctgatgttatcgtttttaaaccagtgttcaagtattttcagctcacgtaccttcaatatttgaaatctgtctattgacaccatcttcccgcccccgcctgaaccttttctattattttacaacaaaaaaacgaagggcttcccgccctccgtttcttatttctcagataattttccgcctgaataaacggcctctttcagctcaattccgagtgatttggccatttttttcaatttggattcttccatcggcgtgacaaggctgagtacggttccttctttaccggcccgccccgtccggcctgatctgtgaatgtacccgtcttcattcgggatgtccgcgtgaatgacgtacggaagatcatcgatatcgagtccgcgcgccgcaatgtcagtcgccagaagcagcggaaattctccccgttcaaacgctgataatatctttgcccgctccatttttttcgcttctccgtgcaggatgccgagatccacatggtgataggcgagtttttccgcatagacgcttaaatttccgatatctctgacgaacacgagcgcctgcatgccgttcagccgtgacagcttttgcaatagcttcactttatcccgctgatcgcagacgagatattgatgcgtgacgcgcgctttttccgccgtattccgctccactttcaaaacggccggttcgtgtgcgatggtattcagcacctgttctgtttccggctgcagcgtagcggaaaagcttaaaagctgtcggtctttcagcgtcgttttaatgatttttttcatcgtttcgcggtgttcctgtgtcacgagctgatccgcttcatcaagaacgatcgtcttgacttcatgcattttcagctttttcgcctgaatcaattcgagcaccctgcccggtgtgcccgcaatgatatgcggtttatttttgagcttttccacctgctttttcacgtttgctccgccgatcaaagacaaagcgcgaagatcagagccttttatccactcctgaatcacttgaaaaatctgcatcacaagttcgcgggacggtgctaaaatgatcacttgcggatgtttctgttccgggttgatccgctccagaaccggaagcgtgtacgccaatgtttttcccgttcccgtcggggattcggcaatgacgtctttcccttccataatcacctgagcggctttttcctgaataacggtcggctcctgaaaacctgacgcctcccagttttcggcgataaatggttgtgtatgctgtaaaaatggccatgtttgggtcatgtcgttctcctcaattcttaaaatctactccatagtatctcaaatgcaagcgccaaacgcaattttctttttccttccaagccttttaacaaacggtctcctcctttataatcataaatgagaaagacacaagataaaaaatgcgtgtctgataacgatagaggtgtaatgatgagtattttatccgtaaaagatttaagccacggctttggtgaccgtgcgctttttaacaatgtatcgttccgtcttttaaaaggggagcacgtcggcttaatcggagcaaacggcgaaggtaaatcaacgtttatgaatattattaccggaaagcttgagcctgatgagggtaaagttgaatgggcgaaaaacgtgcgcgtcggctacctcgatcagcataccgtgcttgaaaaaggaaaaacgatccgcgacgtgctgaaagatgcgttccattacttatttgcgatggaagaggaaatgaatgagatttacaacaaaatgggcgaagcggaccctgatgagcttgagcagctgcttgaagatgtcggtgtcattcaagacgccctgacaaacaatgacttctacgtgattgacagcaaagttgaagaaatcgcccgcggcctcggcctgcaggatgtcggacttgaccgcgacgtcactgatttaagcggcggacagcggacgaaagtgctgctcgccaaactgcttttagaaaaaccggaaattcttctgttggacgaaccgaccaactaccttgatgagcagcatattgaatggctgaaacgctatttgcaggaatatgaaaatgcgttcatcttaatttctcacgacattccgtttttaaacagcgtgatcaatttgatttatcatgtggaaaatcaggagctgactcgttatgtcggcgactaccatcagtttatggaagtctacgaagtgaaaaagcagcagctcgaagccgcctataaaaaacagcagcaggaagtggctgagctaaaagatttcgtcgcccgcaacaaagcgcgggtcagcacgagaaatatggcgatgtcccgccagaaaaagcttgataagatggatatgatcgaactggcggccgaaaaaccgaagccggaattccatttcaagcctgcgagaacgtcaggcaagctcatttttgaaacgaaggacttagtcatcggctacgatactccgctgtcacgcccgctcaatctcagaatggagcgcggacagaaagtcgccctgtacggcgcaaacggcatcgggaagacgacgctgttaaagagcctgctcggtgaaatccagccgctggaaggcacggtggaacggggcgagcatcaatacacgggctatttcgagcaggaagtgaaagaaaccaataacaatacgtgcatcgaagaagtgtggagcgaatttccttcctttacccagtatgaaatccgcgccgccctcgccaaatgcggcctgacgaccaaacacattgaaagccgcgtctccgttctcagcggaggagaaaaagcgaaggtcagactgtgcaagctgatcaattcagaaacaaacctgctcgtgcttgacgaaccgacaaaccacctggatgtcgatgcgaaagaagagctgaaacgcgcgctgaaagaatacaaaggctccattctgctgatttcccacgaacccgagttctacatggatatcgcgacggaaacatggaattgtgaatcttggacgacgaaagtgctgtaaacacaaaaaggaactcccgcctgtgcggaagttcctttttttcttaatgtccggcttttattccggcgagatgtttgcgtcccatgagaaggacaagcatgccgacaaaaacgacgatcccgcctactgtatatggagtgcttgcggtgaagtgttctgacagcattcccgcaatccacggagcgagcgcaccgccgataaaacggactgagctgtaggctgaagacgcgattgaacgttcaaccggcgcagaacccatcacagcggttgtcatgatcgtattcaccataccgagaacagcaccggcgacaacgatacatgtaatgatcaacgtctgatggtcagtccagatccccatgacgatgagaatgaccgcaaaggcgataaagagaacgacgagcgaacccactgttcccagcgctttgtgcacgagcggcgccgtaaagactgacgtaattgccagcaataacccccagccgaagaagacatatccaaggccgtgttcatctaaatccagcacgaacggagaataagcaagcaaaataaaaaatccaaagttgtataagaatgcagatactgccattgtcaaaaggcctttatatttgagcgccttcatcgcatcaaacacaccgacgcgtttcgccggtttcggcagcttcggcagcatgagtgaaatcgcgcaaagcgctatgaacataaggacagatactccgaagaacggagcgcgccatgagatgctgccaagctctccgccggcaagcggcccgacggaaatccccaagccgagcgcagcctcatacagaataatggctttggcgctgccgccgactgataccccgacaatgacggcaagcgcggttgaaataaagagagcattcccaagcccccagccgccgcgatagccgacaagctgagcgattgaacttgagcttccgccgagggcggcaaacacgatgataaaaataagtccgagaagcagcgtccattttgcgccgatccggcttgaaatcgcgccggagaaaaacatcataaaaccggtaacgagcaaataacttgtaaataacagagatacttcactaggtgaagcatgtaattgtgcggcgatcgccggaagaatcggatcgacaagaccgattcccataaaggaaataacacaggcaaacgcaaccgcccaaacggctttcggctggctgaataagcctgttttctgttgtgatgatgtatccatttgaccagacctcctgtttcatccattaaaagaaacgctatatccatagcgtttacagcaaaatcattcgattgattgaatggcgcggtcagctttttctttcattccgttaaggcgcgttttaaaatgctgaaatgtgctgatcttctcatcaatcatctcaagctggtggttcaaagcgtgctgaatctcttccagcttttctttccgttccttcggatccagtgacaacaagtacccctctttgtttaattccagctgacggctcatctccataaactgctgaagctcctgaagggaaaaaccgagcacttcttttgtgctggtgactttttcgagctcctccatatcatcttcagagtaaagccggacgccgccttctgtccgtttaggagcaggaatcaaaccaatctcctcgtaaaaacgaatggttcgttttgtcaatccgcttcgcttggcaacttgatcaatcttcatccattccaaggtgaatccccctcttgtcgtatctgtttctattatacaccatttgaaccttaacgtaaacgttaactttttatgcctgataaacttggtttggacaaaacgtttgtctttaaagcgccgggagacatctgtgtaagataaaaaaagccggtatgacccgccatctttctcgggggccgtaccggcttttcttaattctcaagttcttcaatcatcagtgacaattcggtccagcgctccatcgccgcttcaagctcttcagccgtttttgcctgttcggccatcagttcttgaatctttccgaaatcacttcccgcttcagcgatttccgcttccagacgctgatgcttttcttcaaggccggcgattttgtcttcgatgccgtcccattcaatctgatccttatatgaaagctttttgcgctttttcttcggctcttcttccgcctttttctcttcggccggctgttttaccgccgtcttcttcgcttttgcgtgttccatgtattcactgtacgaaccttggaaacgggaaatgacgccttgtccttcaaatacgatcaggcggtcaatgacgcggtcaaggaaatagcggtcatgggatacggtgatgacgacgcccgggaactgttcgatataatcttcgagcacgcttaatgtttccgtgtccagatcattggtcggctcatctaaaaacagcacattcggttcctgcatcagtacattcagcaagtacagacggcgcttttccccgcccgacagctttctgatatatgtctgctgcatcggacgagggaacagaaaacgctcaagcatttgttccgcggtgatgacatcgccttccgccgttttgacgatttcagccgtctcttttatatattcaatgactttcatatcaccgttcatttcgctgtggtcctgggtgtagtagccgatccggaccgtctgcccgatggtgatattgccgctgtcaggctgaattctgccggcgaggctgtttaaaagtgtcgttttcccgattccgttcggcccgatgatgccgattcgttcccccgggatgacaagctcattaaactgactgatcagcgcttggccgttataggtaatggcgacgttatcggcttcgatcacctgttttccgagacggtgggagccgatcgcgaaatcgagtgatccggagactgccggccctttttgctctttgagcgcctccgctctgtccactctcgctttttgtttcgtcgagcgcgctttcgcccctcttctgagccacgccaattcgcggcgcaggaggttttgacgttttgtttctttctgctccgccagcgcttcccgttcggcccgtttttccaggaatacttcatagtttcctttatacgtataaaggctgcctctctcaagctcgtaaattctgttcgtcaccctgttcagaaaatatctgtcgtgcgtgacaagcataacggcgcccggatattgcgataagtagccttccagccattcaatcgtttcattgtccaagtggtttgtcggttcatccaaaatgagcaggtcagccggctggatgacgtttttcgcaatcgcgacgcgctttctctggccgccggacagctcgctgacatccttcatcagatcggtgacgccaagtttggttaaaaccgttttggctaacgtattcgcctcccacgcatcattcgcgtccattcgggcctgcgcatcaagcagctgtttctggcgctggtcattttccggttcttcattcagcgcctgaagcgctttttcgtattctctcatcgttctcatgacggctgatccgccggaataaatatgttcaagaacggtttgtccggccggaagatcagggtcctgatgcaaaaactcaatatgcacgtttcctgaggccgtaatctcgccttcctccgttgattcaaggccggcaatggttttcagaagcgtagacttccccgttccgttcgggccgattaaaccgattctttcattctcttcaatatgaaaggagatatggtcgaataatgtcttatctccgtatgttttataaaggttttccgcttttatgatgctcatggtccctatcaatcctcacgtaagttcatgtgttcattttaaatcaggcgctggaataaaactagtaaaaggacagacaaatttcttggaagagatcattttgtccgaagaatgtttccgcctctccttttatacactggaggtgaagaggtgatgacatgatcagcgtcagtttgtgcgttatcgtgaaaaatgaagaggaagtgcttgcgggctgtcttgattccgtcaaagacattgcggatgaaattgtgattgctgatacgggctcgaccgaccggacgaaagaaatcgcggcccgttatacggataagatttatgattttgaatggatcgatcactttgcggccgcccgtaactttgtgttttcgaaagcggaaatggattatattctgtggctggacgccgacgatatattgacggaaaaggaccgtgaaaagctgattgaactgaaggcgtcgctttcaaaagaggtggacgcggtatccatgtattatcacgtcggctttgatgatcggggagaggtcagcttcagataccgccgcaaccgactcgtcaagcgtgaaaaagggttccgctggatcggagccgtgcatgagtatcttgaagtatacggaaacatcatagaaaccgatattgccgtcacacaccggaaatccgagaaaaagcactcgcctccctcagaccgcaacttgaagatttatgagaaaatggcggaaaacagtgaaacgatgacaccgcgcgatttgttttacttcgcgaatgaattaaaggatcacggccagtatcagcgcgccatcacgtattatcaccattttctttccacaaaacagtgctggatcgaagacgagatcagaacgtgccaatatctatccgattgctacagggcggtcggccatgaagaggccgccatgacgtctctcttaaaatcatttctgatcgattgtccgcggccggagttctgctgcaggctcggcgactattttgcggagaaacggcaataccggcagagtgtgttttggtatgagctcgccctatccgccaaaagcagtgatgcaggctttacccagctcgaatattccacctggtatccccatctgcagctctgcgtctgccactggcagctcggcgacagagaaaaagcgaagattcataacgacaaagccgcctcctatcatccgtcacatccgagtgtcctgtataatcaaaacgtgctcggcacataacatcgaaaaaaagagctgccccgtatgaagggcagctccttattgattacgctgtcggaattcctccgcttacactgtaaatttgggatgtcacatagctcgattcttctgaggccaaaaagacataaatccctgctagctccgccggctgtccggcgcggtttaatggaacggcaggtgtttccttgccgaatttcggaatgttttcaccgggctgtcctcccgaaatctgcagaggcgtccagatcggccccggcgctaccgagttgactctgattcctttatttgccagctgttttcctaagccgacggtaaaaccgataatggcatgtttcgtcgcggcataatccaacagcatcgggcttggattatacccttctacggacgttgtcgtgataatagacgcgccttccggcagatacggaagcgcggctttgacgagccaatacagcgagaatacgttgacttcaaatgtttgatagatttgttctgtggcaagatcgctgatatcatccactgcctgctgattgccggcgacaagagcgagcgtgtcaagaccgccaagctcttgatacgctttttccgccaattctccgcaaatcgcttcatcgcttaaatctcccggcagcagaacggcttttcttccctctttttcaattaacgctttcacttcttcggcatccggctgttcctcaggcagatagttaatggccacatccgccccttcccgggcataagcaatcgcggcggcccggccgatacctgaatcgccgccggtgacgagggcttttcttcccttcagcttgccggctcctttatagctcgtttcaccgcagtccggcacaggcttcatctctttttgcaaaccgggcggttcttgatattgttttggaaattcatcatgatcatatttcgtcagcgggttgtgcagatttgcatcagacatacaagactctcctttatcatgggtgatgtattcgtatgtgtacccctttagcatgacggatcaaacgtgtaagtgcagtttccgattgataaaggaaaaacaaaaaaggagcccgtaagctccctttttttatgactctccgagtacgttttcagccattttcgctaaatgctgggcgcttcccgaaatttcctgcatcgtggcagaaatttgttcaaccgccgccgcttggccgtttgtgttctggttgatggattcaatagagtcctccagccctttcagcaggctgtggatttttttcgtaatctggtcaatttggccgacgttgtcttttgaatgagtggcaagcttgcggatctcatccgccaccacggaaaagcccttgccggattctcctgctctcgcggcttcaatggccgcattcaaaccgagcagattgctttgatccgagatgcccttgacagtgacggaaatgtcggcgatttctcccgcgctttcactgacttgtttcgcctgagcggaaattccggtcatctgtgctgagaaaccgctgatggattctgagatatccgcgatggccgaagcggtctgttccacgacggcggacaggctttcagcgacatcatgaagcttggctgatttttcaaggctcgtgccgagaccgacgccgccgatgacttttccgttttcatcgtgaagcggaatcgctctggcgatcagcggaaatccgaacagctctttcggcaccatgcttgtcttcttctgattcatgcggatcgcgtctgtaatgatgtcccctttttgcagcgggtctcccggctttacattaagagaaaacgttttagccggaatattcacgattaatttttctgtatcataaattccgatggtgatgtcatcttggatcaggctgtttaaaaaaggcgcaactttgacaaatgcgtcaagcaggctgtgcgtttgctgctccgtctgtatactcatttctttcactccttcttaatatgggaattgccgtttttcatgctgaaccgaaatccatttcagcgtggtgaattcttcaaggctccattcaccgttcagcctgccgagacctgattgcttctcgccgccgaacgcgacgttcggttcatcattaatggtcgtatcgttgacgtgaatcatgccggtttcgatccgcttagcaaactcaacgccgcgctcaacgtttgccgtatgcacggctccgcttaaaccgaacggtgtcgcgtttgcgatgcttaccgcttcatcctccgtttcaaatggcatgatgcagacggccggtccgaacagctcctccttcgcaatgctcatctcaggtttcacatcttttaaaatgacgggctcagcgaccgttccgctgaatcggccggacagcaccggaaccgctccctcttctatcgctttttcgacagaccgtctcaaaccttccgcctgtctctcattgattaaagggccgataaccgtatcagggtccatcggatcgccgactttcagcgatgacactttcgcttcgtaaagctctgtaaatttgtcatatacagatgtgtgaacgagcacgcggttcgccgacatacagatctggccttgatgcgtaaaccggctgaatacggccgcattgacggcgtattcaagatcagcatcctcaagcacgatcagcgcgctgtttccgccaagctccaacagcggttttttaaagtgtttgaccgcaagctgtccgatatagctgcccactccggttgagcctgtaaatgagattatccgcgggacgggatgctcaacaaagctgtcgccgatctccccgatatccgtcacgataacattcagcagcccgtccggtacgccggccgcttcaaaaattttcgcgataagcgttccgccgcagatcggtgtttcttcatgaggcttcagcacgacgccgttccccgcgccgagtgccggcgcaacagatttcatcgaaaggaaaaacgggaaattaaacgggctgatcacccccacgactccggcgggtattctgtacagcctgttttcttttccgtcaatcgtggacgggagaattttcccttccatccgcaccggaaatgttgcggcttcttttatcatatttttgacaagtccgatttcaaactcagccttcagccgtgttccgccaagctcctccatgattaagtaaataatcgcttcttcgtgctcttcaatgaaagaaacggctttttccaaaatggcccgctttttaaaagggtttactttgtcccattcttgtttcgcaagagccgcggcgcgatatgccgcatccacgtcatcagacgtcgctttttggaatgaggtgatgactttttgagtataaggatttctgttttccaatacgttccggctgctcccatccctccatcggccgccgataaactgcttatttagttcttcatattgaaacatgtaaaacatctccctttcaccgaaacttgaaattagttgatgagtcatcttttgtatcggtcttaaggtgagaaaattgaactatttcacaataaaattcccgttccttccgtgcatcgacgctttttagctttgtccttttaaagtggaaaattctttaattgactgcgagaaatttcgacaatataatacaaacgtcagtgtatataatgataagaatattatgaattttcaggaggacccatatgtctttactatttcggaaaaagccgctggccgacttaaaggcccagagcaaacagaccagcctgtcccgctcgttaagcgcttttgacttggttttgctcggaatcggctgtgttgtcggcacggggatttttgtgattaccgggactgtggccgcgacaggcgcaggaccggctttgattctgtcgtttgtgctcgcgggccttgcctgcgcgctcgccgcgttttgttatgcggaattttcttcatccattccgatttcaggcagcgtatatacgtattcatatgtcactctcggggagtgtctcgcgtttttaatcggatgggacttaatgcttgaatatgtcatcgcgctcgccgccgtcgcaaccggctggtcatcctatttccagtcgcttcttgcgggcttcgggctgcatcttccggaggcgctgaccgccgcacccggcagcaaaacgggtgccgtgttcaacctgccggccgttatcattattttggtcattaccgcgattgtttcaagaggcgtgaaagaaagcacccgctttaacaatgtcattgtattgatgaaaattgcgatcattctgctgtttatcatcgtcggtttcggctacgtgaaaccggaaaactggtcgccgtttatgccgttcggaatgaaaggcgtcatcacgagcgccgcgaccgttttcttcgcgtatctcggatttgatgccgtgtcaaacgcgtcggaagaagtgaaaaacccgcagaaatcaatgccgttcggaatcatcggcgcgcttgccatctgcaccgtcctttacattacggtatcgctcgtcctgacgggaatgctttcgtacaccaagctgaatgtcggggatccggtatctttcgcgctccaatttgtcggccagaacaagatagcaggcattatttccgtcggcgcgattatcgggattacaacggtcatgctcgctctgctttacgctcaggtgcgcctgacatttgcgatgagcagagacggccttttgccccgcatgttttccaaggttcacccgcgttttaaaacaccgtttcaaaacacatgggtgacggggatcgttgccgccgggatcgcgggttttattgatctgggaaccctggctcatctcgtcaacatgggaaccttggcggcctttacggtcattgcgatcgccgtcatcgttttaagaaagaaacatccggagatcaaatcttccttccgtgttcctttcgtgccttttgtgccgatcatcagcgcatgcttatgcctgtatctcgcaagcagcctgccgggcgtgacatggctcgcctttgtcatctggatcgccgccgggatcgtcgtttatatgatgtattcgagaaaacacagtttgttaaataaataaaaagggaggctcttttttctgtttgagaaagaagagccttttttgcacttgataattcattcaccttatgaataatatggtgtatgcttcgtttacataaaaaggaggagaatcactttggcaattgccgccccgcttaaagaaaaacctgtccatcgtcccgaaacaaccatgtattctattttgttcattatcgggatctgtcatctgctgaacgattcactgcaagcggtgattccggcgatgtttccgatattggaacgttccatgaatcttacatttacgcagctcggaattatcgcctttacgctgaatatggtgtcttccgtgatgcagcccgtcatcggctggtatacggataaacgcccgatgccgtatgccttgccgctcggactcaccgcaagcatgctcggcattttaggtctcgcgttcgccccgtcttttctgacgattttatgctgtgtcttttttatcggccttggctccgccgtctttcatcctgaaggatcgcgtgtcgcctacatggccgccggcgaaaagcgcggcttggcgcaatcgatttaccaagtcggagggaataccggccaggcgatggcgcccttgattaccgcgctgattctcgttccgctcggtcaattcggctctgtctggtttacacttgtcgccgcaatcgctgtgctgtttctcatctatatcgccaaatggtataaaggccgccttattcatttgcgcgccgtaagtaaaaaatcaccggcctccgctgtgcagaccgtgattacaaaaccgattattctcgcccttatcatgattatcttcttaattttcgcgcgctcctggtatgtgagcgcgatcggcaacttttatacgttctatgcgatgaatgcctatcatgtcagcattcagcaggcacagagctacatcttcgtctttttatttttcggagctgtcggaacgtttctcggcgggccgcttgcagaccgtttcggaaagcggaacgtcatcttcgtttcgatgatagcatcggctcccttgacgattttccttccgtttgcggggcctgtcatcgcctatggcgtactggcgctgatcggtgttgttctgatgtccagcttctccgtgactgttgtctacgcgcaggagcttgttccaggcaaaatcggaacgatgtcagggcttacggtcgggctcgccttcggaatgggcgcgatcggagccgttgcgctcggagctcttattgattcagcgggattgacgccgaccatgacagccgtcgcctttctgcccgttttaggtctgctcgcctttgtcctgccgagcgacaaaacattaaaagaatggcattcataaaaacaatccctgccgaaaaggcagggattttatgtttcaaccgtataaaaatgagtgtcaggaaccgcatacttcggaataaacccgtctctgaaatcaggaaacgctttttgaatttcatcaatccatttttttacgtttttgatgtacggcacgtaaatcatattgactgtcgcctcgtcatcaatgtgatagtaccagcacagattgaattcgttctccgtgacgagcgtaaagcctgaaaaatgataaaaaatcagcggggtgtcattgacatatacagccccgccgcgcaggctgacgtcatattgctcaatattccacagcgccgcattcgcgccgatcgactccgtgacatgaacgtcttcaaactgcgcgggccacttttcaacatacctttggtcaccgtatgtctttttttcttcattcatctccaccgtacaataggagatgcaatcctgtctccactgccagaccgcccgatacgcttccccggtattccgcgcgccgacaaacccggtgttgtactgccccgtcagcttgtaataagacgcaaaccgttctgaattgcggtgatccgtcagaaaaagggaagcatccggcttttccgcaaacaactcgcccgcatctgagaagaaaaagagatcggtgtccaagtgggcaaaatattcggctccatcatactccgtcatcacatggaacagaaatgccggtttcagcgtccagcaatattcatgaaacgtccgtccgccctttgcttcaagcagctccgggtcctccatttcatggagctgaaccgccgtgacatgttcccacggcacctgctgaagcagttcgtacgctttctggtcgacacacagcacatacagatgaaaatcccggcaatgctcatggagagaatgaatcatcggcatcagtttaaagatatgcgttctggaaacaatggttgaaaaatgatatttactcaccatatcacatccaatttatttaagatccacatgcagtaaatcagcagccagcgctttgaacgcccttgcaaagtgcgtgacgcccagctttttttccgcttttgccaaaagctttccgacctccggcagattgaagctgttcgccgtgatccgcgggcttttcgtcttccagtccgggtcgaggttgcggtctttaaccgcgtgcagcagctcgagaaaaatgtgcagcaggctttcatatttctcataatcaagcagcacttcgatgtctgccatcatgctgttggttaactccgcgtcaaacgggccgttaaacgcgaggtgcacgtcaagcgaacgaatgtcattgtacttgtcgcacatgtacgcgatattcgccctgatatcatcaacggaagcgcagttgctcggatgctcctgatggacgctcatgatatcgcgccgcagctgaaatctcattcccgactgatgaagcctgatgccgagatcataatcttcaaagccgtatctgacaatgccttcatcaaacagcccgagatctgccacgtgctgtctcttgactgacgaattgttcgtaatgaaaaaacgccacggcagacggtagcctttcaaatcatctccgtatttttccaaaatgcttttcagcacacggataaagtcggtatctaaatcaaagcattggtcaagaaaacttccgtctctgatgtcactttcatcaaggagcggctctttatcgcccggcagctcttcatacagttcggcgagtttctctttatgctctttttcaaaacggtcataataaaagctgtaaatccgcttccagaacataccgcatacgactaaatcgtcccggttctcatgagccttgatatgcttcgccaccaaatccttttcggcaagcatgtcgctgtcatggaagatcaaaatatcgcctctggcattgcggaccgcctgattccgtccgtaagcgatccctctgttttctttaattctcacaaaaatcagcggaaaattcgcgctgaatgattcaagcatggataaggttccgtcttccgaaccgttgtcagccacaatcacttcgaacggctctgtgcattcctgttcattcagggacagcaggctgttataaagccgctccttggaattatatgcgggaacaatgacgcttgccttcacttttcgttcacttcctgtatatgatcatttatttgttatcatcctcagatgcaaagccgctgaactccgggcagacggcgctgaccgtcccgatcacccgcttcagaatgtcctgataaagctgatggacaaacggcaggtcggtccggtccgtctcatgaatctgccgaatgtcgccggctgtaacgatccggtatccgctgaaatgatagaaaatcagaggacttccgtcttcgagcacaagacgcccgtccttccatgaaaacgtgtggcggccgtaattccaatggccgatattcacgccgggcgtggtgatgtcacacacattcgggaacaggccggacatgtaatccaagtagccttgatctccgaattttccttcgcccggcgcatttttgcattcttccaggcagcgttctttccaccatctgagacaatctgtgccggcactgtcggttttgaagctgagaaaaccggaattataccggcctaaaagacgctgcagcatgtcgatttcctgttttccaaatgagggaatgacgatatcgccccgtgacagaagcaccgaacaatccggctgattgtcaaaaatcgcgcgcggatcagcgaagaaaaacaaatcggcatcaatgtacgtgacacgctctaattccggatgtccgtccagcacgaattcgagaaataccggcttcaccgtccagcagtattcgctctgatccctcgtccgcttcagttcaaggagctcctcattttccagtgcggacacctgaatcaaggtgacattatcctgccgcattgcctgaagcacgtcataggtgtcttggtccatacacaaagtaaaaatgggggcgtccgcctgaaccgctttcaatgagccgaacaaagcgatagcctgatacagccttccttttgataaaactgtgcaatatgcgcttgtcacgtctttctctcacctctgtttctgttacttttgaaaaaaggctttataccatttgatcgttttttccaatccttcatcaatggtatgtgcgggtgtccaattcagaagcttcctcgccttttccgccgataaatattggtgcttgatttcatggcttccctggttgagcactttcggcttgaggtcactgtccatggccttaagaattttttctacaagctccagcaccgtcagctgaatctcattgctgaagttgaacgcttctcccgcaagattgagctcctccatcttttccgccagcaaaaggtatgcctcgaccgcatcctcgatgtaaaaataatcacggataaatgtgccgtcgctgcggatttccggcgcttcaccgttcagcacgagctgaatcgtctgcggaataatccggttgaagttcaaatctccgccgccgtacaagttgccgcagcgcgtaatacagaccggaagtccgtacgtattaaaatatgtgtggcttaacaaatcggcacagctttttgatacgtcatacggatgtttgccttgaagaggcatgttttcatcgtacggcagtgtcggctggtcgccgtacgctttatcactggacgcgacgatcacccgcttgatgagcggatgcctgcggcacgcttcaaggatgttccatgtgccaagaatattggcttcaaatgtggaaatcggattgcggtttgcgacgccgacgatcgcctgagcggctaaatgaaagaccgtgtcaatttcatattcgcccagcgcccgctcaatcacatccagatcttcaagcgcgccctgcacgatattcatttgcttcacttgttctccctgatacaggttcgacttgggtacagtgtcacggacaagtcccgtcacattggccccctgatcgatcagttccttcaccaagcagcttcctaaaagacctgtacatcccgtcacaaacacatttttatttttccagaaactcaaacttgatcaccataccttccatacatgttgtccccggtcccacatcttgttgatttccagcaggtttttatacgtatcgatcgccgtccagaaaccgtaatgccggtataccgccaattcgccgtctttcgccagctctttcagcggttcttcttcaaacatgacatccctgtctttcggcagatactcaaataccttcgggctgagtacgaaaaatccgccgttgatgatgccgtcactcgaggttttttcagaaaagcttttcgccatgccgtcttcaaccgtcaacgttccgaattgcgaggacttttctataccggtgacggtcaccgctgccccttttgattgatgatagctgatcagatgaaacaggttgatgttggccagtccgtccccgtacgtcataagaaaggtttcatcaccgatgatgtcctttgcctgtaaaagccgccccgctgtctgcgtgtgttcccccgtgtctaaaaaagtgattttccacggctcggattttcccaatatccgtacttctccggtagagctgtccagcgtcatgctgtgattcttccagtcataatctaagaaatattccttaatcatctctcctttgaaaccaagaagcaggataaattcgttcacgccatagtattgatagagtttcataatatgccatagaatcggtttgccgcctatcatggcgagcggtttgggacgttcattggtgatttcgctcattctcgttccttttccgccgcagagaatgactgctttcatctctacccctcttctctgtgaatattggattcgaaaccgcccgtataagagaaacaacccgataatttgtccgattctctatcaccggtttcaaaatctactgtaagatatgagagattggcgccctttgtgaccaaaagctctctcttttttcagattggtgaagatacacacaaaaaaagagcctcacggaaattccgtaaggctctttctattatttattatcctgattcagcttttctttgccgtaatgatatttagacggatcaaccggcgtaaagtcgctcaatttgtggaatctgagcaagtctttgtacatcacgctgtcagacagcttcagctgctctgtgactctggctttcaggtttttcgtttcctgattgcctttcagttcttttcctgtcttcgtatcgtatacgacattggagatggaagtatatttcggcgtgacgtaatctccgttacggaacgtcaccgtatcatcatggtctttcgagaagagatcggtgccgaaattaatatatttcttagaatcgatgccttccaagtgaaggatcgtcggcacaacgtccatttcaccgccgtacgtatggttcaccccgccttttttgccggggatgcgaagcataagcggcacacgctgattctgcgcgttttgataaggcgtaatttctttgccgagaatttctttcatcgcgcggttatggttttcagagattccgtagtggtctccgtaaagcataatcaccgagttgtcatataaaccggatgacttcagatctttaaagaactgttcaagcgcctcgtcgagataacgcgccgtctggaaatagtcatccacagtcgcgtcgcccgttttcgctttttcgatcgttgcgtctttttcatcaagcgtaaacggataatggttcgtcagcgtcagcaaatgcgcgtagaacggctgtttcagcgattgaagcttcggaatggattctttgaagaatggtttatccttcagtcccatattgacaaggttgtcatcagacatatcgtatgtgctggcgtcaaagaatttatcgtagccgatatgtttgtaaatctggtcacggttccagaatgatttgtagtcaccgtgtaaaacggcgcttgtatagccctcactttggtcaaggatggcaggaagcgattgatacgtgttttccccttttgtcacgaaggctgacccttcaggcagtccgaacagactgttatccatcatcagctcggcgtcagatgttttaccttggcccgtttggtggaaaaagttatcaaagtacgtcatgtcctctccgccgcgggcgagtttattcaggaacggcgtgacttcttttccgtcaagtttgtagttgatcaaaaacgattggaaactttccaagtgaatcttaataatgtttttgcctttggccttgccgaaatactcggcgttcggcttcgcataatgcgacgatgtgtagttttcaacgctcgtcaggtcatcgctgctggcatatgcccgctgggattccgtctgcgccgtctgtacgccgtcataaatcgtgtaattataaaggcctaagtattttacaatgtaattgcggtcaaacgttcttgtcagcagctccgggcggtcctcttcggcaatcgccaggttcacgaagaacaaaacaatacccgtcacgataattaatgacgtataccgttttttcagcttgaattccttcagctcacgtctccacaccagaagtgcgattaaaataataatatcaacaaagtataaaatatcatggccggacataatgctgaagatgccgtctcccatatttcccacattaccggattgctttaagttcgggaatgtcaagaaatcatcgaagaatcgatagaataggatatttgcatacaaaataaacgtcatgatgaaatcaataatcaccatgataatcgctgatttgcggcctttcgcaaacaatgccagtcctaaaaagaaaatggcgcttgagaacggattgatcacaagcagaaactgctgcgtcggacccttcaccccaaggttgaattcagcatgataggctaaatacgttttggcccaaaacaaaataatagccagtacaaaaaaactaagtctgtaagaaaataatttcttcatggcaacctctactttcctaaacactttaaatctgtattcttactttttgcttcaattcctgctttccgagcaaaacgaaagcatcacacagccccataaacacaccatttaaaaaaacgatatatttatcattcgtgtcatgcccattgaacatcttatcccgccagccattagacgcaggatatccgttcttcgtttcacatttttttctggcattaaaaggtaccgtatcagacccggtctgaaaataggagataccaaatataagaataacacaaacttctaaaaacgaaaaatgaatatcaaagacagccgcccaacaggcgggctgaagttattgtatgcaaaggggctgaaaaacttgaaggttttttttgctgatgtaaaaaaaggactggagtcatccagtcctttacctgtcaaattatcgcttagaccctaaagatatacaaaaatgctttcttcacgtttaccttttgttttttataatccaaccatgcagcagagctggcatttgtgactgcttaaactgttctccaacactggtccttaacgcgtcttgcaaatttctgtttctcattagcgaaaaaaattgtgaactggtttcatcaaacccgccaataaaggaattacccacctgaaatgacaccccatgttgttctttggtcacaacatgcagcagctgtttaaattcttccagtgttaaagaagcacggtattgatcttttaaataggcttcttcctcacgagattgcgctgtgttaaggccctctcccaaactgttcctgtccaagtctacaatatagatacatgattgatctgataatagatggatgagtgtatttacaatagcaataggattcttaaagagtccaaaacatagatgtatgaatataatgtcttgcttcttagacacatattgcataatattttctgcatttgaacatataaaagatgcattaataccgagtttttttgctgaagaaattgcttgggcagaggaatcaatacctgtcagttcgatcttttgaaaccgactgttcaaatattgaattacttgcccctgtccgcaaccaatatctaatacagaatacggctctctattaaatttactggagtaaaacgacagaaatgtttcaattgaaatacttctaatggatgaggtttccctctcatcataccgaaagctcactttacttttctcaggatgagaaaaccatgtttgtgcttgaattctgttggcttctgactctctgacaattgtttcaatttccatataactgtgacacctccaaagagtttaccactctgcttgagacattgtcggcgaagatgtatttattttccttttgctgacaggacgaaaatactggatagttaaattatgcacaatatggaatgcagctactgataaaaaatcaaattgtgcagctattacagctattacagtaaatacagtcatatagggggctgactttacaccaccaaggggaatatggagcagtaagaatcctatcgagctaatacacgtacacaataagacagaatcaaagaagtatagtttaaatagaaaaggaatacaaattctccatattaattcctctgaaactgcgcataaaggcaggaaaatcaatgtatcaagtttatttacttttcttttaacaaatacaacagatttgtttttacgcttccagataacataaggaaaaaagaaacctagggcactaaataataaaacaccgtacgcattattgctatgtattaaaaaaaagttatcatctaataagaagatgctgcaacacataattccaccaaaaacggtgataatatcataactgcgctgcggtgttatatgacgagtcagtttatattccttagttctatgcttgatttgatacataactgttagctttgaaacatagggacccatcaaatgaatcaggatccctataaagatgcatacccttaactccatcatgttcctgcaactaaagtatatataggtgcatcgtctactccattatggccaccaataagatccatgagctcatcatctataaaccctccgtatggacggctctggatacattgggctgtggccaataaaatcatattctgcatcagatgacccgcttcaataaatataaatcgatatgaacgatggccatatttaaaccttgacctccaaaagctagccgatatgattacagcgaaagaaaagtcctttacagcttcttcttgtaacattattcttccgaaatcctcttcagagtactcacctagatgaactaggccctttcgataaggatcaaagtgatatagacctttttccaaagaatccaccttgttgctaacaacgtacagatccaacggataaagagctccgccagaaggaatagggcgtctaggaccttcagggcgctctattaatccataactaccctgcagaatggtagaaagctgtgataatgttgtactaccaccgttaaactgttcgatacttctcctatttcgaataacttcatctaatgatacacttgtcctcaatggggaaggtaatgtaatcaatggcaagtcatcaaatcgtttacctgcatgagtagcgatcttctgtaatgttgcagatctcattaggcctgctactcctggcgcgtcccacgccatagagcttcgataaactttcgaagcctcaaaccagttctcagaaggatcatcaaatcttagtttttcattgccatagactacatcaaccaaattagtggcatgcctttcaatctctttcatttcgttaacccctttcaccttagtatttatgggaatggatgaggtactggattaagtgtttcgattgtaaacggctctggtactaaccctaaatcgtaagaatgtcgtaatatacgttctccacccaacattcttcccctgtaaaggacatctataggtttaaaccctggaatgatggactttactacataagctccggcatcttttatatcaggacttgttaaatcaaatgtagccactttgaaacctttttcatataggtgatcatttagactattccaaagtacatcaggagaactatcatcgaatgacttaaattggttaacatcaactaaagtgctgttacttgtaaggaaatcagcttccttgacgatatcggttcctgcgtaaagcttgatatggtcctcaaaactattgatatccctattaaaatccgcattcactaatgcgttacctaaacgttgttccgtcttgacccaagttcttgtatacatcccttcaattgctgccttttcacaagccctttctattgaataggaggaggcggctccaattgcaaaaggggctaaattcgtatgaggatttctgacaactgctagcacagaaggaatacctgaaaatacagtcatatcaactaagtgcagccgcaatgatgttggtttaatatatctttcataaaagcgttttaatctcggagaagaattcacatcaatctggggcaagctcagcttgttataccaggtaagcataaaagcatcccgttcaatcgtttcaaataaacctgaaattgctgcttctacaaaggtaattccgcaagcaagaccgttacttgtagcatgacctatattagtgtccccaggccattccgtatgattggcgatatggattagttgccctggggtccatacctcctcatttgttttcgcatatgtcccttttctccaccacagcttagtattttcatcccaaacttcatgaggaaatataggatctttgaattgagttggagcgtacaattcccaatctttatatccaatgaaacgcttattctccttctctaattccttttgtgatccaaaacatacaacatcggaatcaaatggaagataagctgcactatatctttccaccgtttccccaatagcagctagtcttgccgcagccgcattatccgatccgcctccattataagaattagaggggactccgaataaaattttactgtctgtcccatgagcaccgtacgagtgtccccaaacgtcatctacatcgcgtaatttccgatactctcttctcactatacctacatatggatcagcaagactatcaaggactttccatgaatcttctaatgtcgtccatttactcaccataattatttgggcacctcgccgtgataccatacttgaggaaatcctgtgtcagcggcaggagaacacttttggcatctcggtactctatatacacgatgattatcaaccgaaactcccctgtcatccaaattgacagttataaaaccacctggaacggcgcttggtgcatagtctcttagtgtaatccactctgtgacaagattattcgctattcctgcctgtaccaaatgaactggctgattatataccggttgtttcgcagcgttgactggcttgaccttcatcaattctgaacgaaatacctcatctgaaaagtttgctgatttacgtaagttataacaatggagacatgcagacttgtgcgggatgaaaaatggaccaacccaagctgtctgaccatcgtatggaataacacacaaccaagggacatgatcttctaatgattgatcatttacttgttctaacagcgggtccaaatgtgaagctgctacagcaatacgtatcgaaggcttcccattatccggtttttctttccaatctatgtttaatcctgtttcctgcaagctattagtaagggttattgctaggttattttccccatgtgctacaacttccactatgcttgtctttaatctatgtaagatctggttgactttcacttgcccccctgccctctcatatgccaaaaaagcagtcatgtcaaaattagaagtagattgtatacacaatccgttcgtcaccaggaaatcgaagacgtttcttaactgttctttctctaagttgaacctttggtgcagttcttcaattgagactccattctcacatacaagatattctgaaattgcctcaaagaattcaacgattccttctccatcaacttttgtaatggattgtgctttaaagcttaacaggcttccttccaattctcccaaagtaatatgaggagataatttgaaccttacaaccgtttgaatagattgagtttgttgagacatctgtattcctccttaattaatttgtttattttcaaataattgagctgcatttggcggatgcccaattatctgttccagaatattagtagttggttctaatcggtcatcggaagacagtatctgatattctaccaaccattctattagatccagtggcatgttattttgcatcagcatcctaatcgcttcctctttatttttacattgtaaatctatctgcatctccaaatcttgttcaaatatatctttaagtctttccatactaataacttccgctccggttaggtcaaaggctttccctgcgcgaacatttacatctttttttgagattaagcatgcagatgcaacatcttgagtggaaatccaatttacgcctaccggagaaaaagcagtgagcagtattcctgtggctgctgcccatcctctgtacaactcgattccgatatccaaaggggatgttctgtataaaatactttttttatatttttgtagtaactctgtttccacgtaacccaattcatcattcaaattatatctccggtttgaaagtatgattgtttctgcatccaagtcaaaagagttgatgaaagaatcactttcgtactttattgatccgcctaaatctacaatctgcaatggataatcatggagctcagccgccttatcctccaatatttgtttcaggggttccctaactcccatgtagtgaattttcacgtccaatacctcctaatcaataatctcactcgatcaatctcatgatttgtcatcagaaagataagcaaaaagttaatataaccaattaatacttaatatggaaattataaatttgataatcaccgtaaataaatgtcttaacaaaagatggttgaaccataacagttaggacagtgcagcagcaaatagaaaacagcatacaagattaagttagttaggatcagaagttaaatacctttcttaaaagtaaacaaaggatggtgtcttgagaaaaacaaataagttaataacgtattacttcctcctactttagcctggttcatctctctgcgacaaaataatacagggagttacgaatacacaaatatcattaaatcagttattgattttgtaatactatctgaagaagcttcgaagaatgctgaggtaatacaaagaagagtaaatctttcgtaggtgacaccagaatcattacaataccaatggggtacaagaaacccttagtaaatttaagctttattctaagcagtcgggcagtcatcccttttgtccaacagacaaagctcaagcttccttgaagtttgacatttcctgttaagaatccacccaaagccccgatcagcctatgcgattcgcctgaattggcttagctttaacttcaaacaacgtttcctttttcctaacaagttgggttattccgcttaaaaaatagtatttattcccataaccctattaaaacacatactttccctctgatcaaatataaaattcagaattattaatttcatttttaactaaatttagagtgattcagcttcttaaaccaaattgctcattataaatccattatctatatcacaaaaaattacatatttgggttgacaatattgtccatataaatcacaatatggtacatatcggtaaattctttgtcgataaattttatggaggaggtaacaattatgactcaaattaaagtgccaactgctcttattgcaagtgtacacggagaaggtcaacatttattcgagccaatggctgcacgctgtacctgtaccacaatcatctctagttcatctacgttttaacctctaagacaaatagaccaataagatgattcttattggtctatgcttctttatattaaatttaaattaattctactgaatgtaatgaagtcccctcttcttgcagtatacggtatgttgttttatccattttgcctcctgtaattttaacgtttgcaatatcacaagattcaaaccgaatattaattagattgcagttcgtaaaggatactttctttagatagcagttcttgaagaacgtatgcaggatggaggtatctgtaaaattgacttttggcaggtgacaaccgatataaagcatatactcaagtttacatgtgtcataatttgactggctgagatcactttttttaaatgtcgattctatgatggcggagtctttacatgagaaattcttgaagtagcagtttttgaagacagagtgttcgacatcgatattctgaagagttgcacttttaaagtcactgagatagtactcggcatttaccggctcaaaatcctccgttttttgcaaattcttatttataaacgtcttttttttgagttttaatacattggatttatctatattcaggtcactggtatcgaccgccaagcttttggattctatttcgcgtataagcaacttctcaatatccagctttgtcataccctctgcttccaagctaatacttctatcatgaagcttagttaaaagctccgttttttttctgctcagtaacgaatttctttcgtactttttaaatagaccctcgacatacagttttagtttttcacttatcatttcccgctctccttttagtcccagctgcgttttaatgacccattcttcagcggtctagtttcttgccattttaatgtaatgccggtatccaattagagaaactataaatcccagtattgtatagctcagtacaacaagggttacccatattagactttctcctcccgatatcgtcgagaccgattgaattaacccttgatgcgcccagtactgcggaaagagcattccaatagtttgaagatagcttggtaattgatcataaggggtccataaaccgcatacaacagcggtacctaatgcaatcacatttgtcatgaccaaaccggtattttcagtctttgcaaagactgaaatggcaactccccaggatgtaactagtaaagatatcaacacaacaacccacatatacgccggaaaattattaatttcaatatcatacagaaatattcccagaacggacaggagaagaatttgcataaaagttatgactaaaaaagggatactttttcctaagaagaagttataaggctttaaaggggtacttgccagtcttgatacaattcctttttcccgatcctttacaaaacttataacgatggagataataatgaatgtagaaaagaatacgctcataccggttacagattgtgaagctactaaagttttgtttgtactgtctgtcgtaaatagctcaatcagcaatatgatggacacaataggtaatataatcgtccaaaaaaacagagacttatcctttaactgttttagcgtttcaatttgagcgagcggtaacatgataaattccccctttattcttcatcacgcaaatcagtgccggtaagtttaaagaatacatcttctaattttggcttatataaaaacaactgatgaggcacaatattgttttccttactgacgctaattaagcgctccatggtttctaaaggttttttggtttttattatcagccctgaattaacgactgaaaactcaaaaccatggctctttattaattcatgagacaatgaggagttaaacataatagatgattcttcatgtcgtttaagcagttcatttatttctccttcatcgataatctgccctctgtcgataaaagctacatagtcacaaagagtttcaatctcttccatgtaatggctcacataaataatggttttaccggcttttttgagtcgatttacgatgttaaaaatgtagcggcgtgattgcggatccacgcctaccgtcggctcatctagaataattaagtctggatcgtgcattagtgcacacccgatatttaaacggcgcttcattcctccggaaaagttctccacaacgtcgtttgccctttctgacaacccgatatcttctaacagtttttttgttgtttgctttagttttaagccattcagtccatgcacctttccaaaaaattccatgttggtctttgcggttaatttttcttcaaggctgatatcctgtggaacataacccagtctgccatttttattgccgacaaattcaatcttaccgtcatattcccggatgatgcgcgagatgatcttaattaaggtagatttaccggatccgttcggtccaacaagtccataacagactcctttcggaattgttaaagccacattgtccaaagccagagtcgtgccatagcgcttacttatatgttcaacttgcagcatttacaccattcccccactgttatttattttaaatatggattcaattgtattaatgtactccttgtaggctgctttcccttctttcgtaatctgaacaatagtcttcggctttttggatacgaacttcttggttagttctatataagctgcatcttctaactttttcagatgcgaacctaaattcccatctgtgatgtctaatgactttttcaggaaagtaaaatcacattgatcataagtcatcagtaaactcataattcccaaccgtactttggcatgtattaaatcattgatattgttaacattactcatttccttgcccttttcttttcaaaatcattcctgtaagtaataggctgcctccgccaataaatgcaaaaacaatattcattgcctcaggaaataaacagaatgtaagcataccgagtatgctcagccaaaatcccataataaaaatctcttttgttaacacgatgcctaagaatatgtacataatagacaccattaacacaatcaaaaacgatagaaattctcctgttcgcggcaataatcccattaaaatcaggaaaacaaaaatgcataccattaatatgaatccaatccatgcatattttaattgattctttaagaaagtgggcatgggatcaaattgtttctgcttaagatatgtcttcaaagtcagtatccaccctaatactgccagtattaaccagacacaagcaaggactacagaaggtaccttacataaagaaacggagtacgcaataatccatatacagccccaaataatgaaatatggactggtttgccttgagtactcagtcttgtagttcgtcaagaccttgatatgagataagttttcagctatctctgattctcgaaaattctgatttgacataagacaggctcctctttttacaaagtactttgtgaaacagagtatattctaattccatatatttgtaaagaggttttatccaaaataggcgcaactatttagtcttggaaacagcagatgggactcttggcgctgatatccttccaccactgtgagacatccttatcttgttataatatctcacaacaaagccttcagattgctgacaaaccgaatgtatatcgattggaaagcaattcattttcttgaaggaaaaaggactggagtcatccagtccttttcatcaaatcggtcaaatccccgcccaaacatcttttgcgtaaatgccttttgtctggaggtccaaaagccattcttgcgcttgccgttcgtctgtttcgtggaccgactgatacgctttttgcagcgttgcctctacatcgggcgccattttgctgccgtcgccgcatacgtagaggtgccctccccggccgaggatggaaattaaagcgccggcgtctttcgccattaagtgctgcacatacgttttcggtacgccttctttgcgggagaaagccgtatgaagcgtcacgattccgtctttttcataagcttcaagctcgtcacggtaaataaaatcatgatcgtttctgcatccgaaatacagatgagcctcccccagctcttttccttctttttttaacgccgcgcgggcttgcagaaatccgcggaacggggcgactcctgtgccgggaccgaccataataatcggtttttccggatcttccggcagccggaatcgtgtttccggagtgcggacaaacatcacgataccatcctcagggccgcggtccgctaaataattcgaagcgactccgcgatactcacccaaaccgctccgggcggggccgcgaacgacgccgacggtaattgaagcctgcccgggatgtttccggggcgaacttgaaatcgaataataccgcggcttcagcggacgcaaaagctccagaaatcgctcaaacggaagttcacacgcttcatatttttcaaggagatcgagcatcgagacgcgcgatgttaagatttgctcctgatagacgccctcctcaagaaaatcttccaattcccgtttgtgcggcgggcagaccgtataagcagccatttcccggatttgagcccttgatgccgcttcctgcaattcgacacagctgctcagaagatcatgcagcctgaccggccgatcgagcgggagatgaaccgcgctctgtccgctggccgtcagcagcacttgatcattcccgttcagattgaaccggcggagaacacggctgacctgctctttgctgtttaccggcagcacgccgagatgatccccttcattataggcagcctctttcggcagagtgatttcgatatgccttgtgctccggccgctttccggcgcctgaagttccctgttttccgcaacggatgcgtaaaccgcttcatacgtctgtgccaaaggagacccgccaagcccgctgacaaattgaaggcccagcgcacttcgctctttttcggcattttcattcagcttgagaccgaatgccttcatggcgtccgtccacatgctttttttccattcatcaagctttccttcaaaatcgccgctgacgtccccctcgcctcgagaggaaaagcgttccgcccctttttcggcaagcttctcatcaataagcctcggtacagcctgatatgtcgccgcccagttatgatcaccgcagccgaagacggcataccggacgccttccagctccccgggtttgacttcttcaagccattgaacgaattgtcccgcgttgctcggaggctttccgttataagaggacgtaatgatcaagagagctccttctttcggcagttttccgatccggtcatttaaaggcgccgtttcagtccggacgccgtgcatcccggcagtatcggcaagctcccgcgccacgccttctgcggttcccgtatctgatccgtacagaatcagaagcggtcggttatcaagcccgataatggatgcgccttttgtttcccgtttttctttttcgacgtcttccgacgctttttcagccgccgggagagcagccgcaacggcttctttgtttctcggccgcacccggatatgaaagtcgccgggcttgatcgtcagtgtctgtttaatatcgagctcataatcggtgtgatcgataaaggtaaaatgctgcagaatcatccccagaacaagagttgcttcatgcagggcgaactgcataccgatacacgccctctgaccgtttccgaacggcttatacgcatggtgaggcacttgatcaggatgttcaaaccgctccggataaaattcctccgcattgtctccccacgcgtctttatcacggtgaagctggggaattaagacggaaattctgtctttcggcgtgatcggatatttcccgccgatcaccgtatcctctttcgcataaaggctgaacgcaggcgcggtcggccataaacgcaatgactcctgcaaaatcattcggatataagtaagatccagcacttgtttatatgaaggaacgggatcggtcaatacccgatcagcttcctcataggctttttccaaaacacggggatgtttcagcagaaagtagatggcaaaggaaagcaggccgctggtcgtttcgtggccggcaattaaaaacgtgatgatttgaaaccggatattttcatcatcaagtttttcgcccgtttccgggtcttccacattcagcattctggccagcagatccttttcatcccggccgcctgaccggcgctctgcaataatactgtctactaacgaaaacatcgcctgaatgtcatgatgaaattggcgcttcgtcctgatcataagcttatcctgaacatcaaggcgctgcatttggtgcatcgcttcatcaagggcgcgcaccatgctgttgataaacggatgaggcgtttccctgtaatagctgttaaaccgatagttaaagccgcaaagcccgatcgtatcgagcgtcaggcgggtcatatcagcaggcacatcaacggcctcatccgggttcagcctagcccatttttgaatcagctgcaccgcgatatcagtcatcatcgaatgataatctttcatcgcgcgctggctgaaggtcggcatcagaatattatgcgcctttcgccagttaggctcatgcgtccagcttgtaaacagcccgtcaccggaaaacgcccggactttctccaaagccccttcaatgcttttatcgaaccgctcttcatcacaaacctctttcaccagttcatggccggacacgacgataatggcgcccgccggcgtatgcagctgaaaaataggcccctgctcgtttgccagtttgataagcgacattgtaggcttgtctttatcaagcaaaggaagattgccgagcgggccgaatgtcttcggctgcggaatcggacctgtttccttcatgaataacaccctttctaacacattgatgcgttccttccaactacattgcccttttcaccggccgattatccgccgtcacggatcaatcatcggattgacgatcgataacggttttttctatactggagaggcttgtcaaatacagaaataaggtgagttcacatatggattttgaaatcaagtttttatcgttttatgtcattcaagtggaaggaaaagatgaacaggcaaacaaacagttcaaacatttccagacccttgacacggaagaatttgaagaaagcgagctgaaggattttcttgacggggaattgaagaaaatcgtcaaacggaaagccgaacggcatccgcaatccgagcaagtcccaacaaaaatcggccattttatcacggagccgggccatgagcttgattcaaatccgaattacaaccttttcaaccgcgccagacttgcggatacgaaggaagcatttatcgaagcaagcgagcagttcgtccgcacttaccttgacacgagcgctgtgcgcggcggtgtttttatcgtggcatcggccgttccgcgcaagtattttgaagacaaattcgtctttatgatgaaatgcgatttcgagccgaaggtcgcccgcatctcagacgcctcgtctctcattaaaaaggtcgaaatggccatcacgacaaaaaacatgaaaagcattcaatatccgtatatgccggaagaaggcatgacggaagagcatgagctgaaaatccaccaggcctcgcacgcccgttatttcgaagattttctcaaatttgtcgaatacggcgaatcgatgccggaaatcatgaaaaaccaagtcatgaacatggtgcaggagcacgtgtatgaaaattttgaagaaaacagcgaagagcttcagcagtttgagcacgacattgaaatttgggaagcgagtgaaaagcgggaaattcaggagcgcctcgacacccatcaagtcatcgaggcatccgcgcagatcattgaacacacgccggaagccgagctgaaaatgaaagtcggagaaacagagattaaaggattactggctgatttcggtgaatccatccatctcgcaaaagtgaacgggcgctatgtcgcgctcattgaggcggaaacgatctcgtttgaaaaaggcagttcgccggtggagtttcacaagcctgaggggctgcatgaggtgattgaacggatacggaataaatctgaacaagactgacaaaagtccagacgccatgttctggactttctttatttaataaggctctttgagcaatcgatagcatgcaccgatgatgtcttggactccgggcgttccctttatctcgcggcggacgatttcagatgatagattctgcacctgtaatgcccgctccgcccgtctttcgaagtatgcttgacatgcagtttcatggttttcgtgtttttgcagttcttcactaagcacaatcgcgtcttcaatcgccatcgccgctccctgcgccaatgtcggcgctcctgcatggacggcatccccgcccagaacgacgcggcctctgtgccacggttctttgaccgccatctgctcaatcttatgaaacaaaacgggatattcctttgacatattctctgtcacaaacttcactcccggaattccgcgcagcaagtctttcacccgttcaaaacgcgtgtcctcgtcatccctgaagtcagcgtcatacggccggatgataaatacgtatcctgttttttcagagagcggcacgactccgacctgcgtctgcccttttttatacatcagtgttgaatcatgaaatatcggctcgggaaaagaaatgtaaaatctgtgcgctcccatgccgagatactctgttttcacttctctttgcagcatttgatcgcggacagcggagcggatgccgtcaaagccggcgagaatgtcagccgtcatcatggttccgtctgcacaatgcaccgttatttcatctgccgtttcttcgtaagacacgacttttttaccgagcagaatcgtgccccccgccgcttcagcatgctttttgaggatatcgtttaacgtttgccgcaatatattattccgccccggcaatgaatcatctaaaaacgcctcactcactttaaactgcagcgttccgttttcatcatgctgcttcagccattccgtttgaaagccgtgttgacagcattcatcatacacaccgatttcccgaagcacccgcagcgcattttgaggctggagaatgcccgctccgctttttcgcatgccggacgccgcctcgcaaagggtcacttcaaaacccgctctgccgagagaaatcgctgcggacaggccgccgatccctccgcccgctatgatgatctttttcacttcatggttcatcacgataccgccttctctatttatttatcacttattaactattagccaccttactatataggctgaaaaactgtcaatctttataagttgccttttgaatccggcaagcttatactttgaatcactaaaatggtacggaggcttacaaaaatggagttgagacatttgccggattactcgcagattgccggacgcgctgagatttacgccgatatggatgctgaatcattgaaaacatttttgacgttatttgatatgtctaaaaaaatgaatcaggtcatggagcattatttctcaagtcacggattgtccgaagggaaattcaaaattttaatgtttctgtttgacgcacccggacacagcctgagtccgacagagctggcgaaaaaatccaacgtcaccaaagcgaccatcaccggattgatcgacggactcgcacgggacggctttgtaaaccgcagccggcataccggcgacagacgaaaaatcagcatcgaactcacaaaagaaggaaaagaaaagctgatgctgtttcttcccggccacttctccaacatttcaggagtcatggaaagcttcaccgctgaacaaaaagcggaattgacaaaaatgcttgaagtattatttgataagcttctgctgttttccggcggcagaacataaagtagtatcgtaaaaacaaaggcaaatttctatgagatggaaattgaagtaaaaagatgagggttatacaaaacagcctgcacatttgtttgttcaggctgtttcagaagaaataattttaaaattactttctcttcactataaatgcaggtgttttaatgctggaagttacatttgtatatcgatttttagtcttcaacctcactctcacactatttgatcctttttttaacgatttttgatttgagagtttaaatacttttttaggtgttgagtgactgaaagaacctttctttgtttcattagccacccattttgaaccgttccaaacatcaattgtcatggaataatcaaatgttgcgattgtcccgcccccatatgatgctacacaatcaatggaagtagcttttgcagaataagaatccgcatcggtacaaactcttaatacatatgttgcataatctgtactacaaggcataatatccttcccctttcaaattttttgaaacaggcttgttattatgacaaaccctccgttcacttctagctggcaaacgtatgacaaaggggatctcatggcttaggagagtaaaaattcaaaactcttagaaattaacaaaaggcgcccctctcagcagggcgcctttttcgcgcggttaatcatcactgtttaaaattccgaaaaaccgtagcaggttgataaacaagttaataaagtcgatataaagcgtcaatgccatcaaaggaatcaggtcagccgtgatgtcccggtgcttgatctggttcagatcgtataagatgtacattgaaaacacaatcgtcccgatgacggaatacgccatcatggcggcggaattcagcgggctgaaaatattaaagatccccactgcgagaagtgcgataacagcgacgagcaagaaggaccataaaaatgacaagtcctttttcgtcttagcgccgatcgtgccgagcaccgcaaaaatcacaaacgatgaaccgaatgcctccaatacgacataggcccccgccgcggacgcataatggctgataatcggaaacagcgtcattccggaaatgaaagcgaatgaaaagacaaacacatatccgacggctttttttcggcgcagccaaaatgcggcgatgatcatgacgacctctaagaccgacagcggcagcatcaatgccggcggaatgaacttgcccgtatacaggccgattgtcgcaactaacagtgtaaacacaaataccgttataatgcgctgcataatagattgtttgctctcataagcagcagtttgcatgtcaaaagtcctcccaaaaaaatgatcttgataggtctattataaataaaatgggagaaatttgtatgattttaagaagattttaaggatgtcaggcctgacgttttgctgcgcattcctgcatatccatgaaatcatgcagttttttcgtcaagccgccgtgcccgaatcggatcttccccttctgccccggcgttttcgcgaaatcgagaaatgccagcacataaagacgcctgacgggaatcggaatgacgcccgcatcataaaaccagccgtcaattgtattgagcacgcctttgttaataccgtattgcttcgtgcaccaatgcagaaagcgcacttcgggcaggtgcagataccggctctcccggaaaggaacagttgaatgcttcatatgtaccgcctcctgtcattggctgttttttaagattgttttacttctttgctcttcagggaaaatcgatatttctccaccttatcaatttgtgtcacttgggaattatgaaccgtaatctgaactgtcccgaaatcgagcgtttccagcgcgctgataatcttttcgatcacatgcggatctacgtttcctttggacgtcatcatgctccccctttatgtctggccgttcgtcttttgacaatgagtgttttaattcatactattctgataagaaatatataattatactattatgttttcattcagaaatcaataacatttacacaatttttggatatgttttctttgcgaaaactgtcacttccttcgctttgatttaaaccgtgtcatcccgaaatcgactcccaaggcgtcatatagctgtttttaagaacgcaatcttcaagttccgacatatttacattgttttccgctgacaaaaaaagcgccccgcctctggacggagcacccttttttctatgcttttgcttcctcgatcacacatgtgacacccatgctggcgagcgcctgctccagggagccgtaagtttgatactctgaaaaatcaagccccaattggatagaagtctgtgccacatcaggccgaatgccggaaaacacggttctgatgccgaggagaaataacgttttcgacagcatatacaattgctgcgccaccatcgtatcgacaatgggcacaccggacagatcaatcacaaggtttgtgatccgtttggcgacacagttttccggcaccgactccaaaatcacgcgtgcccgtctcgtatcaatcgagccgatgagcggcagagtgccgatcgtatccgcgatcaaaataaccggacagctcaattcggaaataagctcctgctgagatgacagcctcgcgatcattaatttctgaaactgttcagtaaaatccgtcatcagctgatcaaacgagccgttgacaaggtgattccagcggcgggcatcctcgtttgttacgatgtcctgatgctcatccataaaacgggtgaccgcctcccaaaagacggttcttgaattgccgatcgcctcaacgacctcatgaacctccgcgtcttgctccactctgcttttcgctacctgtgcggcccatttttctttgttatgctgaaaaacggccggatcctccaaaaaagcgcttgcgatgaccgtgtttgtaaaggtatgctgctcgatcagcagccgtttcatttcctcacttaattgatccgcagaataaaaacgccctctcagcttccgtctcagcttgagccatttttccgtcagctctgccgaatgtgtaataatataatcatgaagtaattggtctttgttcactgccgtctcctctttcaagaatatgtacttttgtctaaattataaatcggaatcgccgatcgtactagagaaattaaaaaaagcctgcacattaaagctgttgattgcttttttcggcaggaggatacactataaaagaaatgaaacaggaggtcagtatgatgatcaaaaaaatcgcaacagtcgccgtatacactgatgatcagcaaaaagcgaaaacattctggacggaaaaagcggggtttgaaaccgtagccgagcatccgatggacccgggcgccttctggcttgaggtagcgcccaaaggggccgccactcatttggtgatttatccgaaatcaatgatgaaaggggccgagcatatgaaggcttctatcgtatttgagtgtgaagatgtctttgccgcatacgaacagatgaaaaagaacggcatcacctttttagatgaaccgaaacaaatggaatggggcagcttcgtgcaatttaaagatgaggatggtcatgtctttctcctgaaatcgtaatccgtcaggcatctcaattgactgtgagaatcattttcatttaaaatgttggataaagcgtgaaaaggattggagagttgccagatgttcgtgcaaatcagaaaaatgaccgtaaaagaaggacatgccgacaaagtaatcgaacgcttcagttcagaaggcgtgattgaaaagcaggaaggtttgatagacgtaacggtcctggaaaaaaaagtccgccgcggtgatgaagaagtcgtcgtgttaatccgctgggagtcagaagaccattggaaacaatgggaaaaaagcgaagaccacatcgcggcccacaaagcaaaccaaggcaagccgaaacctgattatatgcttgggacggatgtcggtatgtatcatgtcagagccgttaaaacaggcgtacacgaaaaataataaagagcatttgccccagggcaatgctctttttattttttctcctcatacggcaggacaaacagcggtttatcgggcttccattccgcatacagcacgtcctccgttcttttgatgttcagctttttcagctcctgagtcagctgcttttcttccagcccggcttctttcagattttcatacagcacttcgccgtcaataatcagcgtgaccggcaaagagacctgcttcggctttatttgcatgtcgccgtttttcgtcgtgtcatattgaaatttcggcaggacactgaccatcccgtttgtttctaaaatcgcgtactccgcttcctgtatggaaaagcaattcgcctgtctgagaaggctttgcaattgattaatgtccagcttattctttttcagcacatcatatttcagttttcctttatgtatgataatactcggctcgccttccaacagctttctggagctttttactttctgcgtaatcagttcgatgagataaattaaaaccccccataacagagaggcaaaaatgatttcaaaaatcctgacgcctttatcatacaccgcatttccgaccagttcgccgaggatgagcgcggaaataaaatcaaacggcgtaatttgcgagaattgagtttttccaagcaattttaaaatcacaaataaaatacccaaaccgcatactaactcccaagccactgtaagtaaatgtcccatattcgcaccttcttcttaaaagtcattaccattatggacattcgcctgttttctatacagcggccggcaacacacaaaaaaacgcagccgaggccgcgttttttcacttctgcttactgtttttgattcgatctgacgacccgtaagcacacctcagcggcataaccggcagccgctccggaacccgcaaacatcgcggcaagccccaagcccattccttcccagccgccgacaccgaaaatgctgtaaacaaccgtaccgaaagcagtcaggcccagcaccgccaaaaggcactcaggccacatctttttcggccatttcttgcggagcacagccgatacggcaaagttaagacaaaatgcggccagacagatcagaaaaaaaaaccccatgtcttttgcacctccgtcatgagtagctttttatttgctcacctttttttcaaacaaatgataacccggcgcgggtccttttgattcgtaccccattccgctgtaaaacgactgaagcgccttgttttcggacacgcaatcgagccggattttcgtttttcccggacaagacacacccgtctccgcccaagtcatgattgtccggccgagccccgcccctgcaaaccgcctgttaatcgccagccggtggagatatacggactcctcatgtccttcatcgccccaaagacgtctgtcccacccgcttgcttcgggaagcagcatgacgacgccggccagctcttcattctgcctgaataaaaaaacatacccttgggcgatcgcctcccgcatattgtgggtatcttccccttgcagaaggccgctccactggttcgaccctttatcgcgaagccattctgccgcttgcacgagcagatccatgacctcttttgcatcatctttccgggcgggggtgacccggaatgcccccgccgtctcctccgtaatcgtaaaaggtgtcataaaatcctcctgtaatcagaatattcgacacctttattatagaccaaacgcagaaaggaaaaaaacagccatcgtgtttgagggccgtttaaaaaattttcttcttatcacgttcttcttttaaaatctcaaccgcttccctgaaacgcatagagtggacgatttcacgctcacgcagaaaacggagtgaatcattcaggtcaggatcatcggaaatatcaataatccattgatacgtcgctctcgccttttcttcagccgcaatatcctcatataaatcagcgatcggatctcccttcgcctgtatgtaagacgctgtgaacggaactccggccgcattgtgataaaacagcgcgctgtcatggttgacgtaatgatcactgagccctgcatcacgcagctgctccggggtcgcatcttttgtcagcttataaatcatcgtcgcaatcatttctaaatgcgcaaactcctccgtgccgatatccgtcagcaggccgatcaccttgtcaggaatcgtgtagcgctggtttaagtaccggagcgctgcggccaattcgccgtccgccccgccgtattgttcaatgagaaacttagccagcatcgggttgcatgtactgactttaaccggatactgcagctttttttcatatacccacatttacagatccctccttatacttgccatggccaaggaccgcggccccagtcccattgagcgccgacctgactcacgccgaattgcagaagcggtccgtactcaggctcaaaccgctttctcagctgtcttgagtaccgggaatattcatgaaactgctgaagcgcgagacggtcatggggatgcgtatccagataaagcgtcagctccaccaagacaaagtccgccgcctgaatttgctccagcagccgataatattcatcatcaatctttttcgccatattcgattcccccccgataaggattatcatagaaatcgtaaagatccttccaaagggtcccttttctcaatgcctccatcggagaaaactgctctaagtgatacggctgaaaccgcatataaagatgcggcggcgttctgaagtattttctcccgatcggcgggcagggatcaaaccggctgtggaagggtttataggatttgaccggtgtaaacggctgattttctttcattacgatcctcctttcctaaacacatgaccttaataggtatgaatccgtatcggcatttatgccctgtaagaaaataaaaaagccagcgcttagaaacggtcacaaaaaaacactcttgctgttccaagagtgcttttcccgaatggtcagatatattggctgtcccgatgatgatgatgatgatagaacgggtagccgccatagccgccaaaaccgtaccccggatatcctccgtagcctccgtagccgccgtagccgccaaaaccgtaccccgggtagccatagccgccgccgaaaccgtatcccggatatcctccgaagccgccgtagccaccgtagcctccgtagcctccgtagccgccatagccgccgccgtaaatcggtcttctttcattcatgatttatcgctccttcacataggttacagtccagtttatgacatgcggaaggaaacgtatgggcatccgcccagttttggcgaaataatcaataattgcttacggagaaatacgatacaggccgaccgcataagcaaaattaaaaaggccggaacttatgccgccccggcctttttgtctttattcgcctaaatctacattgtgataaacctgctgtacgtcttcgaggtcttccagcacatcgatcagcttttcaaattgagctttcgcatcttccgggagctcgacttcattttgcgcaagcatcgtcagctccgcaaccgtgaactcttcaacgccggcatttttgaatgcctcctgcacggcatggaattggtcaggctcggcatacacgatcacactgtcatcctcttctaaaatatcgcgcacgtccacatcagcttccatcagcaattccagcgcttcatccgccgtcttgccttcaacgccgataacggcagtcgcatcgaacatgtaagcgacagacccgctcacacccatatttccgccgtttttcccgaatgcggcgcgcacttcaggcgccgtgcggtttacattattcgttaacgcatcaacgatgatcattgaaccgttcggcccgaaaccttcgtaacgcagctcgtcaaagttctcctccgcgccgcctttcgccttttcaatcgcacgctcaataatatttttcggcacactgtacgtcttcgcgcgctcaagcaccacttttaacgcctggttcgattccggatctggctcgccttgttttgccgccacataaatctcacggccgaacttcgcgtaaatccggctcgtatttgcgtccttcgatgctttcttttctttaatattgttccacttacggcccattttgttccactctctttcacgaattgaatctgtatgataaatactctgcttctattatacctcagcggttgggttgtttcgagtgtaagacattagaaaaaaacaggcacgcttaaaacagtaagccgaatgtgagggttattatacaaaacataaaaagcctcccttcatacaggaaggaagtcgcaagccaaaagattcattttattcttattacctatttcctacactgtatatcctgactcacgtggtaaaattttgatatcgaacaaaagaaaggatatggtcatgaaagttttcgaagcaaccaccctcctcgccgccgccaagcagcgcgcgggtgaatacaaagaactccgcggccaaatggtcaatctgaaaaaagcgtttcaaggtatggctgatcttggtgacaatgatttctcaggccggggcgcaaataacatcaaagctttttttaaggaccacgccggcgtcacagacagctggcttgatctgatcgacatgaaaatcgcatttctcacaagccttcccggcaaaatcgaagacgcaggtctttccggatctcatgtagaagaatcatttctggagcacgagctcacccacgccctcagtaaatcaaaggcaattatggaagagcagaaaaaggacatgcgctccatcctcggtgagatcgatgacatcatctcgcttgatctattttcaacggaaagcacagatcagaagctttcttcagctatcaaaaaaagaagcgaaacgatacataagctcggcaagcttgatcacgatctaacgaaagaatacgcagaaaccgaagcaaatgaacattttatccaagcagatttccagcagctccaaaacgctacaggcaaaggaaaaaacgccacgccgcttcactacaatgccaaggcgtaccgagaaagcgacatccataagaaaaaagacgagatttcaagacattcggatgcttatttgacgattaaaaaggaagaagcgaaagagcgtgagattgaaaaactgaaagaaagactgaaaaactacgattatgcgaatgccgatgaattctattcaatggccaaaacgatcggctataaaaacctgacaaaagaacagcagcgctacttcactcaaattgaaaacacgcgtgaacttacagacggtttcaaaggcgttgccgtcggcctttatgattccggaaaagacgcggtcacaggcctgtgggatatggtcacagatccgggcggaacggttgaagccattacaggagcggtggctcacccgatcaaaacgtatgaagccatttcagcggcaatcgaagaatcataccaaaaagacatggtgaatggcgacacctactccagagcaagatgggtgtcatatgcagtgggcaccgttgtgacatcagtcgtcggcacaaaaggcgtcggcgccgtctcaaaaacaggcacagccgccaaagtgacaaccaaagtcaaaacagcagcaagcaaatccgccacagctcaaaaagcgataacggtctcaaaacaaaccgttgatcacatcaaacaaaaagtaaacacaggcatcgaagtatcaaaaaaacgcgccaaaaccaagttaaatcaaatgggagatctcaccctggctgatattctcccgtatcatccgcgtcacgacttagtgccggcgggcgttccttacaacgcagtcaacggggtcacacttaaagaaggacttcagaaattcgccaaggtcatcctgccgaaaccgtacggaacctccgcaagcggcagacggacaccggcaccgcatgtaccgccggtaacggtcaaatacggcgagcattttgcgaaatggaccagaaagaaagtattgaagccgaatgtcatctacaaaacaaaagaaggctacacgtacaccactgacaactatggtagaattacaagtgtcaaagcagacttgcagctgggagaagcaaaacgcaaccaatatgcacagtcaaaagcaggtaaaccagaccgtctgacagatgacgacggaggccacctaatcgccacccaattcaaaggctcaggccaattcgacaacatcgtgccgatgaactctcagattaataggagcggcgggaaatggtatgagatggagcaagagtgggcaaaagccctaagcaaaaaaccacctaaaaaagtagcagttcaaatagaaccagtctattctggagattcacttagaccatcatatttcgatgtaacctacaaaattgggagcagaaaagaaataagcgtctctattaaaaatcagcgagggggttaacctaatggaaactaagagaatgcaagatttatatcaacttattggagaaaaactaaatgacattatacctggtgaatggacaaagatatatctttatgcagaagtattagatgattccacaatggttctttttcacttcagaacacccgaaaataatcaaattatttattcacaagatatacctagccattacaacgtaagcaaggacattttcaagacgttgttaagagaactaagagaactttttgaagaattaaaaactgaacacagaaataataacgatgatgtttggactaaccttacactaacattggatcgtagcggagaattccaattagattataattatgatgatattttagcatcagatttagatggatatgaaagaatcgcaatatgggaatatcaaaacttggggattttgcctgaagatgaggacgataaagaatttgtaataagctacttcggtctataaatcaataatggcccagcgcttctctgctgggctattttttataactaggatttttcgacaatcggagttgaaaagattggaaactaaaaaaatgcaagatttgtaccagcttattagtcagaaattaaatgacatcataccttgtgaatgggcaaaagtatatctttatgcagaagtattagatgactctaccatggtcctctttcacttcacgacaccagaaaaacatcaacttatttattcacaagatatatctgcccgatacagtgtaaataaaaatatcttcaacacttttcaagagaaatccgagaactctttagaattgagcacaaaaagaataatgataaacaaaacaggcagcatccagtaaacggatgctgcctgttacatcgttatgtatcgtctgaggaggtcatttattttgttttttaaatatgaaaatagatatgacggtaaatatgatggctgtaatgacaatgacccacaagctcgcagccgtactgataaaatggccgtttaacttgtagacgatcccgtaatgcttttcatattcctgtatttggtccgcagaagcatgtttaaatactttatcaactgagtctgtcataaacgcttttctgaacagaacagcggtgtggctgatagggaaatacataataatcttctgcacaaacaccggtacgccgccgatcggcacatatactccgcataaaaaaccgatggctgttccgacaatcgtacttaacgtcgaaaatgcattttgtgtgtgaataaacagcgttaaaaataaattaatggagcttgacagtgcaactgaaagaataataatccccaatacttcaagtatatctgtaccgcttaaaagtttgctgcctgatgaaacgagaaaaatttcacagcctaaaaaggcgatgaatgaaaagatcaagccgatgacaaatgaatgaatgacatagctcaattggatggtcgcccttgataaaggagctgttaaaaagtcatacgttctcttgctttctttatctttcaccataattccgaaagcgcctaaagtcgttgtcacagctgtaatggacagcaatcccgccaccatccattcgttcaccattgctttggaatcatctgtcgaaccgaccaaggccttaatggcgtccagctgtgtctgctgtaagaacacggcatataacagaatgacgataaatactgacagcaaagaaagaagcaaaagagttcgatcacggaagtatatttttatatttctgctgattaaactggataaagacttcatttatgcaatgctcccctttactggcaaactgcttccttgttcttcgataatatggataaacacatcatccatattccctttaatcacctcgaaagattcaatttttccttcaagacctttcaaaatgtcaaacgcttggagagtggactctacacgaagggaataaatagagtttttaaccgtaaaatccagttgtttattttcaaaccatgcagtcggatcaacgccttgcttaaacatcatatgcagactgtcaaacgcatattgatctttcagctgactcggtgtaccctctgcgatcagacgtccttctttgatgaccacaacgttatcagccacagcggcctcctccatgtaatgggtcgttaaaaagatcgtcatgtttgtttcttcctgcagccttttaatcgcattccaaacaaaaactctcgtttgcggatcaagacctgtagtaggctcatctaaaaataatattgtcggtttatggatgatggcacgggcaatatctgctcttcttctttgtccgcctgacaaatcgctgtattttttctccttaatatcatccaattttaaatagtctgttacaaactgatagttctcttgcacttgtgccttgcttaaatgataatattgtccgcggttcatgatattttcataaacggtcaatcgttcatccaaaatgctctcttggaaaacaactccgatctttttgcggatatgattattctctttcccctcaccaagcgtataaccgtctattaccacttttccggatgtctttttaatcagcgtacagagaatatcgatagtggtcgattttcctgcgccgttcgttcccagaaatgcaaacagctcgccgcgtttgacagaaaaggatacccctttcactgcttcaaatgatccatattttttacgaagatccgttactgtaataatgtcttgttcttctcccattctgttcacctcgaaaagtaagattctataccgttgttcactaactttatatcgtcattcccgccaggattttctcatttttatccaactttattatctttttataaataattataacgatataatttattattttcgcgttttgttattgggtttaggctcggtggattttctatacatagggatcacttattgattttgcatgaaacttatacatgctgtaatcaataaaccctttatcataaaaagggtttttattggttaagaatctctaatactatttaaaattcttgtttgtaaccgaaatacatattatcttagaatattcagaaaggagaacgtaatggaaacatgcccttattgtgcaacttcaattcaaaaggataatcagtattactgtagtttttgcttaatgtacatacataatgttcagagagatggcaaacgtgaaatcatagaatatcgtgagcatacttctgaattagatttggataagtctacaccagaactaatgactctgccaacaattgaattatttcatttactgcggctctcaagaaaaatacgcaaacagaagtatgatcagctatataaatctcgacttgaatcagaaaagggaaatgaatcagaaaatgttcaaatcgcaacggatagttaccaatattacacaaagaaaatgtatatcatagagaatatattaaataaacgtctgggttacattccggataggatagataatgtatttcttaagagttatttagaaaaagtaatgattagtaaggagaaaaaacaagatatgaaagtgtattaaaaaagctgcccctctagagtgaatattaataaagggttcctaaaaaggtaccctttattacataaagaggtgtatagaaagctatattataggcgtcaaccaaacatcttctggtactcctctcatgtcacgagttcgtcctgaatgcaaaaaaaatgcggattaaaaaaaggcaaccatccctaagggttagttgccttctcttaattccagcacagccacacactccacatgattcgtatgcgggaacatatccacaggctgcacttcgcgcgtcacgtacccgccatcctcaagcacccgcaggtctcttgcaagcgttcctggattgcaggatacgtacaccacccgcttcggtttcatctcgatgattgtccgcaggagggcttcgtcgcagccttttcttggcgggtcgacgacgagggtgtcggccgtgataccttctttataccatttcggaatgacggtttccgcttctccgactgcgaattccgcgtttgtgatgccattcagctcagcgttgcgttttgcatcctcgatggcttccggcacgatttcgacgccgtatactttcttcgcctgcttcgccagaaatagagaaatcgttccgatgccgcagtaggcgtcgatgacggtttcttccccttgcagctccgcgtactcaagcgctttgtcgtagagcacttttgtctgttccgggttgacctgatagaacgatctggcggagatggcgaatttgacgtctccgatgaggtcgtagatgtattcttcgccccagatgacgtttgtttcgttcccaaagatgacgtttgttttgtttaaattgatgttttgcacgatcgatttgacgtgcgggaattgcgccgtaatgtcttcgatgatcttcgctttgtgcggaaaatcgcttgttctagtgataaagacgatcatcatttcgcccgtgacgacgccgtatctgaccatgatgtggcggagccagcctttgtggcgttcttcgttataggctttgacgccgtatgaggcgcaaatgtctttgacggcttgaacggcttcgtcgtttttggattgctggatcatgcaggcgctcatgtcaatgatgtcatggcttctttgctgatagaatccggcgacgagtccgccttcccgttctcctaccggcacctgcgctttgtttctgtagttccacgggtcttccatgccgagcgtcggatgcacgatgacttttgaaaggttcagcttgccgatccgttctaagacgtctttgacttgtttctgtttaaacaagagctggccttcataggtcatgtgctgaagctggcagccgccgcattgtttgtagattgggcacggggcatccgttctgtgcgggctttcttccttcagctcgattaagcggccgaaagcgaagccttttttgacgcgtgtcactttgatttgcgctttttcctcaggcagggcgttcggcacgaaaatagggaagccctgaacctttgcgacgcccgctccttcgtgcgtcaaatcctcaaatgtcacatcatagtattcatttttttctatcgggggtttcattttcatctataatcacctctagttttaccaatagccttgtttcagcgtgctggcaaaccttcaaattcaatgtcagccttcaaaggtttccgatcacgctgaaaagatgacaaaatcctaaaacgaatactgttttaggattttgtccacgtattaatcatccagctgttccgctttctccttcggcatgatgacgtgaatatgccggtacaggttcacgaattcgcccggcagcatgccgccgtactcgccgtccaggttcagctgcatcttttctgatacattgactttcacacggttcgcttttgtgtaaataatgtgctgatcgttaatatgatcgcctctgagcgccatgctcgcgactctgataaactccgcgagattggcttttttcaaaataattaaatcaaacatgccgtcatttaggctggaatcaggggccagcttctcgaatccgccgaccgagttggtcagcgtcactaaaaacagcataatttcgccttgaaacagcttgccgtcatattcaatctcgacttctgtcggtcgaagtgaaggcagcatttccattccctttaaataataagcaagctggccgagcatcgttttcagtttgctcggcacatcatacgtcagctccgtcagacggcctccgccggcgatgttgataaaatactgaccgttcacctgtccgatgtcgatcgggcgggctacgccgttaatgacggtatcagcggcattcagtatattctctctcggaatgcccagcgctctggcgaagtcatttgtcgtgccgaccggaatgatgccgagtgtcgggcgtttgtctaacggcgcaaggccgttgacgacttcattaatcgttccgtctccgccggctgcgataatcaagtcaaactcccgcaaagcggcttcttttgcggcgttggtggcatcccccgcgcatgtggtggcatgggtggaggtttcataaccggcttgttcaaatttttgcaggacctgggcaagatttttcttaaaaagctcccgtcctgaagtcggattgtatattatgcgtgcacgtttcattatctcatcatcctacttaagagtatccgatccattattaacactaacaacctttaattatactatgacttgagaaaatcgcaacaatatgtacagaaattgccagaagaaaaaaggccccggctccgtttaaggagccaaggcccgctgtcttactcttcttccgttccaggttttttcttacgaaatttcgctaatacttcatatacgatcggcacaatcagaagggtaagcagagtcgaactgattaaaccgccgataacagtgacaccgagtcctttagaaatgacctggcttccgccttcgaagcccaatgccaatggaagcagggcgccgattgtcgcgatcgccgtcatcagaatcggacgcaatctcgtagagccggcttccaggagcgcttctctcgtcgataagccttccgcttctttatggatgacgcgatcaattaagacaatcgcatttgtgacgacgattccgatcagcatcagcataccgatcatggcattcagactgatcgtctctccggatacatacagtccggctaatgcgccgatgactgtaaacggaagcgagaacagaatcgcaaacggcgctaatgctccgccgaacgtgatcacaagaacgaggtatacgatggcgattgcggcaagcattgctaagccgagtttcgtaaaggaatcagctatatccgctgatacaccgccggtatcaatcgatacattgtccgggtgatccagtttgtcaactttcttttgaacggctgatgacaccttcgtgacgttgtcagaagtgacggttgccgttacgtcagcgtacactttgccgtcgcgtttggaaatggtatcggatgtcgtgccgtttttcactttcgccacatcgccgatttttacttcttggcctgcaggcgatgtgatggttttatcctctaattcttttacactcttatactggtctttttctgttttgatgttcacatcaagctctttgccgtcctttttcaccgttgtcaaaggagactgtgacgtttgggacatcagggcttgggagatttgcgaagccgtcaggcccttcttgctgagtttctcctggtcagcgacgaacgtgtactcatcatatgtgctggaaaggcctgagttgacgtctttcagatccttctgctttttcatgatgccttcgatgtctttgaccgtgcctttaatatcagactctgaatctccgtacacatagtacgttaattcgttgttgttgcctgacgaactgaaattttgtgatttccattcgccgcggctggatgtttttttgatttcttttaagacattgtctttttctttgtcaaaatcaggcgtgtcatcctcgtatttcacgtagaacaatgcgccgtttaagcttccgccgagcggactttgcgagcctaatgaatactgaacggtatcgacatgtttgcgtttaagcagcatgtcttccgctttttgcgcagctttttcagcttcgcttttcgtttcgcccggttcaggcgtgtatgtgagctgcatcgttttgtccgcttgcgcaggcaggtagctcgcgccgatcagaggtacgaggaacaaactgccgacaagcatcagaaccgcgatgatagatgtaatccatttatgtcttaatgaccaattcagcacttttttatagaaattggccaatctgcccggcttatgctctttcgctttaacaggcgcgcctgtgagcgattttttgaataagctgtgcgcaagcatcggcaccagtgtgatcgaaatcaacagcgatgcggcaagcgcgaagacgattgttaatgcaaacggcataaacagttcgccgatctgtccgccgaccatggcaagcggcaggaatacggcaatggttacgatcgttgatgacatgatcggtttaaacatttctttcgtcgcttcacgcaccaattgcttcccgcgtaaaggttcatctttcagcctcatgcggcggtaaatgttttcgatcacgacaatcgaatcatcgactacccgtccgatggcgaccgtcatcgcaccgagcgtcattatgttcaatgtgacatcaagctgattcagcacaagaagcgcaatcagcagtgacagcgggatggaaacgatagaaatcatcgttgatttaatatctcttaagaataagagaatgatcacgaccgcaaaaatcgcgccgaaaatcgctttgcttaacatcgtatccaccgactctgtaatcggctctgccatatcaagagtcgagctgtacttgaaccctttatggtcttttttgtattgattcagttcatctttaatcgcatcggccacttctaccgtgttggcgtcattggcttttacgatattaattccgatgctgtcctttccgttcgtgcgggaaatggattcagcttttttcacatctttaatgtcggcaatgtcagaaagcttgactgtcggcacccctgctgccgcgctttgctgtgcctgctgcatagcctgagcgtccgccgcagatgccgcaccggctccgcccgtttgaccttgagcggcagaagaagatgtgaccggaattctcatatctttcagatctttaattgacgtaatatctccgttaacgacaactgatttttctttgttgccgaacgtgtacaatccaagcggcgtattgacgtcagagccttggatcactttcttgacggtatcttcatcaagtccgtactctttcatttttttgtctttgaaagagaattccacctgctcttcctgctgtccggaaacttgcacggacgcaacgccctgaatgccttcaagcttaggtacgagagtgttttccacatttttggtcaggtcttcaagcgagcttttgccgcttgtcacactgagcgtcaaaatcgggaaagagttgaggctgtaacgggaaatgtcaggttttttcgcgtcgtcaggaaggctgacactgtccagcgcttcagcgacttcggttttcgccttgtccatatccttgttgtaatcatattcaatcataaccgatgagacgttttcagaggatgtggacgttacgacgctcactccttctaaattctggaccgcctgctcgatcggttttgtcacgtcatccgcaacttgactcggagcagctccgggataagtcgtatttactgaaaggtaaggcatgttgacgtccggtatggattcctgcttcatattcagaccggcatacagccctgctacagtaacgataatcgtcatcagccaaactgcgaatttgttcttcagtacaaagttaataatgtggttcatcatgtcctccgttaatttttattgactgactggtcattctatataatactaaacggtataactcaacatcgtcaactaataaggcagtaaatttttctaaatttttcaggattaaggggaagcacgtcatgaacgaaaaaaaagagaaaatcataaaaacaggcatccatttatttgccaaaaaagggttttcttcaacaaccattcaggaaatcgccggtgaatgcggaatttcaaaaggggccttctatctccatttcaaatcaaaagaagaccttttgctctcagcatgtgagtattacatcggcatgtctatggaagaaataaagaaaatcaaaacagaacatcaacataaaccgcctaaggacgtattccgaaaacaaatcgcatatcaattccaggaatttatggaacacaaggactttatcatcctcttgctgagcgaaaaggtcattcctgaaaatcaaaaggtcaaacagtattttcatgaggccaatattcaatttaacatgctgtatcgggatgcgttgctctccgtttacggagatgccgtcacaccgtttttagcggatgcgtccgttatggcgcaaggaattgtgagctcctatattcatttcttgatttttaatgaacatacggcattccggacggaaaacgtggcggcctttctgattgccagaatcgatgatctgattacggggctgataagagacaatcccgatccgctgctgcctgaggatatcttcactcagcccgcggcggacagagaaagactgcttgcggatattcaaaagattaaaacacagcaggagctgcctgaggacgtcctcgtatcgcttgaagtcattgaagaggaatgtgcaaaagaagagccgcgaaaaccgattattaaaggaatgctgtccaacttggcaggcagcggaaatgagcagattgaaatgctgcgggcttccattgaaacctatttcagcttataaaaaaaaagagaccggcgcttaccggtctccatgtcagcagcgcccttacaggcggctgcttttttttatcgttttttgatttcttcaagtaagatcttgttgaccatcggcgggttggcctgtccttttgaggctttcataatctgcccgacaaggaagccgatcgcgcggtcttttccgtttttgaagtcttcaattgactgcgggttgctgtcaagcgcatctgttaccagcttcagaagcacgctttcgtcagaaatctgaacaaggcctttttctttgacgattttttctgcgtcgccgcctttttcaattaattctttaaagactttcttcgcgattttggacgagatggttcctttttcaatcagcttaatcatgccggcaaggccttcaggagtcagtgcgacatcctcaagctctttttgttcggcgttcaggtaagctgagacttcacccatcagccagtttgatgcctgcttggcttctgcgcctttattgaccgtttcttcgaagaagtcagccatttctttcgtcagcgtcagaaccattgcgtcataagccggcaggccgagctcttcgatataacgcttgcggcgctcatccggaagctcaggaatggttgctcttacgcgttctttccattcgtcatcaatgtagagctcgacaaggtcaggctcagggaaataacgatagtcgtccgaaccttctttgacacgcatcaaaatggtttttttcgtcgcttcatcgtagcggcgcgtctcctgctgaatgactccgcctgacagaagcacctgctcttggcgtttttcttcatgctcaaggcctttttgcacgaatgcgaaagagttgaggtttttcagctccgtttttgtgccgaatttctcctggccgatcggacggagggaaatgttggcgtcacagcgcagtgaaccttcttccattttacagtcggaaacacctgtgtattggataattgatttcagcttttcgagatatgcgtaagcttcctccggtgtgcggatatccggctcagatacaatctcgacaagcggcgtgccctggcggttgaagtcaacgagggaatagccgtcgcccgtatgcgtcagttttcccgcatcttcttcaaggtgaagacgggtgatgccgatttttttcgtttttccgccgacttcgatttcgatccagccgttttcgccgattggcttgtcaaattgagaaatttgatatgccttcgggttgtccgggtagaaatagtttttccggtcaaacttcgtatccgttgcgatttcgcagttcaaagccattgcggctttcatcgcgaattcgaccgcttctttgttcaaaacgggcagcacgccgggatagccgaggtcgatgacgctcgtttgggtattcgcttccgcgccgaatggcgtcggtgagcttgagaaaattttagattttgtttttaattccacatggacttcaagtccgattaccgtttcaaagttcacttcatttcaccccttacagttcaggtttcgctttatgatgatctgttgcctgctcaaaagcatgagcgacgcggtatacagtgccttcatcgaagtgttttccgatgatttgcagtccgagcggcagtccgtccgcaaatccgcacggcacgctgattcccggcacacccgcgaggttgacagggatcgttaaaatatcgttggcgtacattgtgagcggatcgctggttttttcgccgattttgaatgccggtgtcggcgttgtcggtccgacgatgacatcgtatttctcaaatacgtcttcaaaatcttttttaataagcgtgcgcactttttgcgcttttttgtaatacgcgtcatagtagccggagctgagcgcgaaggtgccgagcatgatgcggcgcttcacttcgttgccgaagccttcagagcgtgtctgtttataaaggtcgatcaggttgtccgcattgtctgagcggtagccgtagcggatgccgtcaaagcgcgcaaggtttgcagacgcttcggaagaagacagcagataatacgtcgcaagcgcgtatttgctgtgcggcagagatacttcttcccatgtcgctccgaggtcttcaagcacttttaaagcggctaaaaccgattctttcgcttctttgccgacgccttctccgagatattctttcggtacggcgattttcaagcctttaatatcgccagttaatgaagaaagaaagtccggcacttcgacattggcgctcgtagagtccattttgtccgggcctgaaatcgcctgaagaaggaatgcgttatcttctacggttcttgtgatcggcccgatctggtccagtgaagacgcaaaagcgaccaaaccgtaacgcgacacacgtccgtatgtaggctttaatccgacgacgccgcagaaagaagccggctggcggatggagccgcccgtatcagatccgagtgaaaacgggacttcgcccgcggcaaccgcagctgcggaaccgccgcttgatccgccgggaaccgtatcgagattccaagggtttttcgtcgctttgtacgcggagttttcagtagaagaacccatcgcgaactcgtccatattcagctttccgatcgttacggcttcagcggcttgaaggcgctccacaaccgtcgcatcgtaaatcggatcgaagttttcgaggattttgcttgagcatgtggtgcgaagccctttggtcacgatgttgtctttgacgccgatcggcattccgaagagaagaccgtgttcagaccgtccgtcaaccgcttcgtcaagttctttcgcgtaagcgcgggctctttcttcatcaagctgtaaaaacgcctgcaccttatcatccacggatgcgatccgtttgtaagattcatcaacaagatcggaaatcttgatttcttttttatgtatcatttgtttcagttctgtgattttgtgatcaaataatgacatactgtctccctcctttaatccagaatagatggcacacggacatagccgtctttatgatcgggagcatttttcatgacatcctcgaccggaaggcctttacccgcttcatcttctctcattacgtttttcattttcagcacgtgtgttgtcggttccacgttatccgtgtccacttcattaagctcctcggcaaacgagatgatgctgtcaagctgttctgtaaacatttcagcttcttcatccgtaatggcgagtctcgccaaatgagcgacatgctttacttcttctatagaaattcgtgacataagatccacctccgcataattctccgtttcgtcatataatactgatcatatcaaaaacgagccctctaaagcaacaaaacgccgccttctgaggcatgatgaaaccctctctattttatcctaaatcggggagaaagagaaacgaattatatgtcagaaaatttttacttttataatttattggtagcgttttcatctctaagctgttctatgttggcggggattttttccttgagcgggccaggtttcgagagttgattgatcggggatactttgttaggtttagtaaccatagccagcactaaatcatgcgatccgcacggaatgatgactaaaggctggatcgccggcgcatattccggcactactaatctacagaggtgatgcaacatttacatgaaagaagagagggtccaaaaacgtgagtattgaattaattatatctcttggcatttactttgctgccatgctgttaatcggctggtacgcattcaggaagacaacgaatattaatgattacatgctgggcggaagaggacttggcccgttcgtaacggcgctgtccgcaggtgcggccgatatgagcgcatggatgctgatgggagttcccggcgcaatgttcgcaacggggttatcgaccttatggctggcgctcggtttgacgatcggcgcgtattcaaattatctgctgcttgctccgaggctgcgcgcttacacggaagttgcggatgatgcgattacgattcccgattttttcgataaacggttccgccactcgtcatcattgctgaaaattgtttccgccgtgattattatgatctttttcacactgtacacatcgtccgggatggtatccggaggcaggttatttgaatcggcattcggcgccgactacaaattcggtttgtttttaacggccggtgttgttgtgctttacacgctgtttggcggtttcctcgctgtcagtctgactgactttgtacagggagcgatcatgtttgcggcattagtgcttgtgccgatcgttgcttttacccagctcgggagcgtttcaacgacgattgattcgatcaacgccgttaacccgaaactattggatatctttaaaggcgcgagcgtcattagcattatttcttatttggcatggggactcggctattacggccagcctcatatcatcgtacgatttatggcgattaaagaagtgaaagatttaaaacccgcccgcagaatcgggatgagctggatggttatttcagttgtcggttcattgcttaccgggattatcggggttgcgtattctcatcacttcggagtctccgtaaaagatccggaaacgattttcattattttttctaaaatcttgttccatccgctgattacgggcttcttgctgtccgcgattttagcggcgatcatgagttccatttcctcacagcttctcgtaacggcaagcgccattacggaagatttataccgcgcctttttcagacgggaagcgagcgataaagaattggtcatgaccggacgcctgtcggtattgatcgtggccgttatcgccattttgctttccatgaatccgaacagcaccattcttgatctggtcggatatgcgtgggcaggcttcggttcggctatcggcccggcgctcttgctcagtctgtactggaaacggatgaatgaatggggagcgcttgcggcgatgattaccggggccgcggccgttttaatctggatcacgacagggcttgccgcttcaaccggcgtatacgaaatcattccggggttcttcctcagtctgattgccggtattgccgtcagcctgctgaccaaaaaaccggccgatgcttcttatcagctgttcagccggatggaagctcttttgaaaaacaagaaatagacaaaaagccgtcagattttatccctgacggcttttttcttccgcacttgtcctgctataaatactgtgagaaaatcatatcaatttattataagaaaaattgcggaggtgctgtgcaaattgagctggcctatcgaaccagacattttattaaagctgggcattgccacgctgatcggcatgatcatcggtcttgaacgcgagctgaaaaacaaaccgctcggactgaaaacctgtatcgtcatcgccgtcagctcctgtatgctgacgatcgtcagcattaatgcggcatatcatttcccaaaatattaccgaatcatgatggatccgctccgccttcccgcccaaatcatttccggcgtcggttttattggcgcgggtgtgatcctgcgtaaaagcaatgacgtcatatccggcctgacgacatcggccatcatctggggcgcagccgggctcggtctggctacaggcgccggcttttataaagaggcgttcgcaagcctcttgtttatcctgatcagcgtcgaatttcttccgtggctgatcagaaaaatcggtcccaaccgcttgaaggaaaaagatatccgcgtgagaatgtctctttccgataaagacaaaatgaccgagattttaaaggaaatgaaaagcaaacagctccgcattcactccgtccggattgatgatctgggcgaaaaagaatttccgattatggaagtgaaagtcagtgttcataaaaaccgctacaccactgacgtctattatgatattaaagaaattcaaggtgtcgtcggagtgaagtgtgatacgctataaaaaaacgccgggctggattcagccggcgtttttctatttatacgaatgcagaaaagttatactccgtaatcggggtttcattttcgatatcgcgcctgaaggttttcagcatctcaagttcctcgtccccgagtgaattgaggtcaaacgcctgatgcaataatccgtagatcagcatatgacgcagccggaggaaatccgggatgtgttcaagccaggcgggatcaaggtcattttcttccctgtagcctttcataaagtgagtcatgaattcacccgtaaacgcggccttgtcttcatacgggatgaccggataccacaacatgttgtacagcagaatactgatatcattcacaaaccaattgtagccgatatcatcaaaatcaaatgcagtgatttttccgttgtcccaattgaaattgccgtggtgcagatcggcgtgcacaaggccgtagttttcagggttcttcggcaaacggcgcagtttttccattagagcatccgcccgctcaaatacgagatgctgatctgcgggcacgtattttctcagcttcagctgctcctcttcatcccattcctgccttttatatgtcggatcgctcagacggtagcttttcgtcagccggtgcatgttccccgtgtactttccaagctcgtaaaacagagttccgttccagtctgattcctccactttgcgtccgggcgctttttcatagactcttactaaaaacgctccgccttttccatccggcacttcttcgacatctttgccatttaatgaaggaatcggctttgctgctgaaagccctccctttgccagatgatgaagccattccatttctccgagaatatattccggtgttcttctgatcgtatgcgtaatttttaaaatataaggttcgttatctttcacaatttcatatacgtagttctctgcgtccgcgataaattgaaacttggtaaagccgtatatttcacctgcttcagcgagcaccttatcttcctcaaaaatcgctttaatatctttatgcatgctgattcacccttttcataacgtttgtaggcggtgtgtgtactcagcaaatgtcattcatcaacattcctgcccttcttttttcacagcagattagtaacatccgcttagaaatgaaatgtgttttcctgttaattcctgattatacaaatatcttaacatacctcattcctcgctccaacgatattcacattaaaaaaacccttgctcatacagaaatgaacaagggcatcttggttaatcgtaaatatggacggtcggttctttgtcacccgcattgcggacgatcagcgcttcctgcccatcagacgaggtaatgttaatttcgacatcaactgagccttttgaataataatccatcagctcacctgttaagtattgggtgaaggcgatgacttcgcttttcccgtaaaattgcatcgggatttcaatcttcatttttctcatttcatcgttttcgtacattgccgttccgacgactccggtgtaattcgggaagtagctgtcgatggcgtttttgaagcgtttaaatacttcggaatcatcagggtatttctttgccgtgtctgtatccgccggatagaagacgtacttttctttgacatcatcccagtttgaaatggtggatgagccggctttgacttctgtttttgcaatgtaattccccggtacgattgatgttttcggcgcttgtttataaagggcgacggtaatcggcacatttttcaggttatccattttccgaaggcggttaacgacttcctgagcgatttcttcaccgtggctgcggatcgttttgtcactgagctccacttcctgctgcggatcacctgtgttttcacggtaatagtatacagagttgagagcgagaccgatcatgataccgccaagctggatggaatttttatcttttcttactaagtaatcctgctcaagcatggacgctaagtaaatcgggctgttttcatttttctcttttgccgatcccgagcttggcagcacgggatttaagccgagattctgaaaattggaatctgcctttttcgcctttttcagatcactgccttcttttttgcggtcaagccagctgagtaccgtgtcctcatctaaatactggccttcctgatacaaatagtcatccgtcgggaacgtgtcttgagcgagccgcatcagacccgtctcgaattcatcgatgtccagcctcgtgttcagccggtccgcagtcaggccgcgcgcttttccggccttaaacggaagcaccattttatagtaggaatcagagatattatatttcggtatgatcgctttttcagaagactttgccgttttctgcgtgatctcttcctctttgttccccccgaaactcggcgaacaggccgacagcatgagtactgccgccgttgccgtcgccgccaatgccaacatctttttcaatagaaaacactcctcttatttctttagctctcccaatagctgtgcttcattccatacttcaatatttaattcctgcgcttttgtcagcttgcttccggccgcttctccggcaatcagcaagtctgtttttttgctgacagatcccgtcagctttccgccgagcgcttcaatctgcgccttggcttcatttctggacagctcttcaagctttccggtcaacacgatggttttgccggcaaaataagagtcgctgtcctccgcttttacttttttcgggcctttgtagagtgtgttcacaccgagttcctcaagttcattcaatagctcaagcatttcttctttgcggaaataggtgataacggcatcggccatcttttcgccgatttcatccaccgcaagcagctcttcttccgtggcttgtttcagattttccaggctttcaaaatgcatggcgagtgttttggccgcttttgagccgataaaacggatgccgagaccgaacagcaggcgttccagcgaattctctttcgacttttggatggagctgatcagattgtcagttgatttttcccccatccgctcaagccggatgacctgctctttcgtcagcttatacaaatcagcgacattacggacgagatgttcacggaaaagctgtgtgatgacacgttctccgagtccgtcaatattcatcgcgttgcgtgagacaaagtgaatcaggccttctctgatctgcgccggacattccggattgatgcagcgcagcgcgacttctccttcaatgcggacaagttcgctttcgcactcagggcagctggtcggcatattgaattctttttcttccccggtccgctgttcgattaagacattgacgacctcagggatgatgtcgcccgcttttttgacgaccactttatcgagaatgcggatatccttctctttaattaaatcttcgttgtgaagggatgctcttgagaccgtcgttcccgcgacttttaccggttccagaacggcggtcggcgtaatgacgcccgttcttccgacattcagttcgatatcgagcagttttgtcacgacctcttccgccgggaatttataagcaatcgcccagcgcgggctttttgccgtatacccgagctcttcctgctggtcgagcgaatcgactttgatgacgattccgtcaatttcatacgggagatcggcccgcttcgcctgcagctcttcgatcatttcaatgacttcatctatcgtggcgcattttttccgttcctggtttgttttaaaaccgagctcatccagaaaatccaggccctgactctgtgtttccacacccatttcgtcaagctccgctatactgtagacgaagatgtcaagatttcgtttcgctgcaattttcggatcgagctgtctgagtgagcccgcagccgcgttccggggattggcgaacggctcctcttcatgtttcagcctttcttcattgagcgcttcaaatgactgtttcggcatgtacgcctctccgcgcacttctatggaaagattccgtttcattttcagcggaatgttgcggatcgtttttaagttttccgtgatatcttcgcccgtcgttccgtctcctcttgtcgcgcctctgacgaaatagccgtcttcataacggagagaaacagcaagaccgtctattttcagctccacattataagcaacgccgtcaccgacagcctgacggacccggcggtcaaaatcgcgcagatcatcatcgttaaatgcgttgccgagactgagcatcggcgtgccgtgctgcaccttttgaaacgattcaagcaccgctcccccgacccgctgtgtgggcgaatcaggcgttctgagttccgggtgctcttcctctatggcaatcagctcctgaatcagtctgtcgtactcggaatccggcacgctcggttcatctaaggtgtaatattcataactgtactgatcgatggtgcggcgcaattcttctgcccggtgtttcgctgtttctttgtccatcatgttcttcctttcctcttcaggttactgcttttcaatcggcgcaaaagcggcaagcagacgcttcacgccgactgggctcgggaatgcgatatcaagctcggtgctttcgccttctccttttacgctgacaaccgttccggtgccccattttttatggcccgctttatcgccgaccgcccagctgagcgagtcgccgcctgttttgttcgcataggaaacgggacgggatacgggcccgcgtttttgctgcacttttcttcccggctgcatgcgaggtgttttcttctcatttaggttctccaataaatcgccaggtatttccctgataaagcgggattccggattcatattggtgcggccgaataaggtgcgcattttggcattcgttaaatacagttcttcttccgccctcgtaatgcctacatatgcgagcctgcgttcttcttccatctcggcttcttccatcagggagcggctgtgcgggaacacgccttcttccatgcccattaagaacacgacaggaaattcaagccccttagcggcgtgcagtgtcattaaagtgacggcatcctttccgcctgattcctcttccttctggtcgagctggtcaatatccgcaatcagcgccaaatcagtcagaaacgcaacgagagacttgtcttcgcttttttgttcgaagtttttcgtcacggaaagaaactcgtcgatattttcaaggcggctttgggcttcgattgatttttcggccttcagcatttctctgtattccgttttctcgagaatttcttccgtgagttccgtaatggacaggtaatcctgcatgttcgtcagattttcaatcatcgcgccaaagccgtcaagcgcgtttgccgctttcgcgctgacgccgatgaaatcaacctgtttgatcgcctggaacattgacattccgttcatcgccgcatatgaagcgattttttctagcgaagtggcgccgacgccccgcttcggcacattgacgatccgcgtaaaactgatgtcgtcgtccgggtttgacacaaggcgcaggtatgcgagaatgtctttaatttctttcctgtcgtagaacttggttccgccgacgatattgtagttcagtccggattttaaaagggtttcctcaatgacgcgcgactgggcgtttgtccggtataaaatcgcgatatcggaaagcttccgccgccccgagctgtgcagctcataaattttccccgcgacgaattggccttcgccgaattcattgtcgccgctgtaataagaaagcttgatgccttcgtcattttccgtccacaggtttttcggcttgcggtttgagttgtttttgatcacttcgttagccgcctgcagaatccgctttgttgagcggtagttttgctcgagcaaaatcacgtttgcgctcggataatctttttcaaaggaaaggatattcgcgatatccgccccgcgccatctgtaaatggactggtcggagtcaccgacgacgcagatattttcaagacgggccgcaagctgcttcacaagcaggtattgtgccctgttcgtatcctgatactcgtctacgtgaatgtactggaatttgcgctgataaaactcaagcacttccggcacacgctcgaaaagcttaatcgtcgtcatgattaaatcatcaaaatcaagcgattggtttttcagcagttttttctgataatcggtatacacgtcactcgtgacctgatcgtagtagccgccggccgattttgcgaattcctcaggttcgatcagctcgttttttgcgctgctgatggaccctaaaatacttctcggatcaaactttttcggatcgatattccgctctttcagaatccctttaataacggaaagctgatcagccgtatcaagaatggagaaatttcggttgatgccgattctgtcaatatccctgcgcagaatccgcacgcacatgctgtggaaagtggaaatccagatttcatccgcgccgggtccgagaatgctctctaccctctccttcatttctctggcggctttatttgtaaatgtaatcgccagaatgttccatggcgccacgtgtttttccgccattaagtatgcgattctgtgcgtcagcacacgtgtttttccgcttcccgcgcccgccatcagaagcagcggaccgtccgtcgtcttgaccgcttcctgctgaacgggatttaatccgcttaataattgattgctaatgtaattcatatccgttcaccgcctatcaaacatatgttctatcataaatcaatttcgtccgcttggctactttgtctttacagccgccaccgttttaagcgcctgatcaaaatcttcatatacggcatttccgacaacgatgacatcggcatgacggccgaaccgttccgccgtttccgcgtctttaatgccgcctccgtaaaacaggacggacttgtccagcacagccttcgttttctccaccgtttctatgtccgccagcatcccgctgtattccagataaaaaatcgggagatgaagcaaatgctccgcgacccgcgcataggcgagaatatcttctgtttctatatgtgtatccgcctccgtcaaagcggccgccttacaatcagggttgacgatgcagtagccctccgtcacgatttcctccactgacatgagctctccgtattctttcatcgcctgatgatgcatgccgacaatccagtccgcctttttgctgttgagcacactcggaatgaaataaagatcaaacccgggcacaatggaatcaatcgtcgacacctcaagtacgcacggcactaaaaaccgccgcacctttgacatcagtctcagcacattgtcctcggtgatattgtcgcttcctccgatcacaatggcgtcagtccctgattcacaaagccgttccagttgttcatccggtaaatctttattcggatcgagtttaaaaacatgcttccactcgttaacatcgtacatgcgttttcgttcctccattcgtttcttgccatttaaacattataacaaattcgtttggcccggaaaaacggaaaaagacgtcattcacctgattcacaaaaaaagattgcgctccgccggacgggaaacggctatgtttgaaaacagacaatatgtggaatgtcaaagagaaaaaagacaaggagtctgatctcaatggaacaagccattatcgtactgatttgtatattgatttttattattttagttcccgccgcattgtttctctggatatacataagagacgaaaagcaggaagaacattcagtgctgcgcaattatcccgcagcgggaaaactgcgctatatatttgaaaaaatcggacctgagctgcggcagtatttattcagcaatgataacgaagaacagccgttttcccggagagaatatgaacagacggtcatgtccggaaagtataagagcagaatgatgggcttcggctcagaacgggatttcgatcagccgggctattatatccgtaacgccctcttcccgaaacaaagggaggagctgcgcgcagatcagacgccgaagatcgacacgatggtatacaagattgacaaagacaacctgctgaaacgcagcgaacaccgcgaaaaagcaaaagcggacccttattacctgcatccggacgatgtgcaagtgatcggccgcgacacatgcaagaagccgttttatgtgaaagggttaatcggacaatcagcgatgagctacggctcacttggcgacagggcaatcaccgccctgtcaaaagggctgcaccaggccggcggcacatggatgaatacaggcgaaggcggcctgtctgagtatcacctgaaaggcggcgcggatattatctgccaaatcggccccgggctgttcggcgtccgcaccgaagatggagaattttcgtgggaagaattcaagaaaaaaagccgcctcgagcagattaaagcctttgaattaaagcttgcacaaggggcgaaagcaagaggcgggcatattgacggttcaaaggtaaccgaagaaattgccgccatcagaaatgtgcagcccggacaatccattgacagcccaaaccgcttcaacgagttctcaaatgttccggacatgcttgatttcattgagaaattaaggactgtcggtgaaaaaccggtcggcatcaaaattgtcccgggcagccgcaaagaccttgaagaccttatttcctgtatgagttcatcaggcaaacttcccgactttattacgattgacggaagtgaagggggaacgggagcttctttccatgagctggcggattccgtcggcctgccgattctgaccggcctcccccttgttgacggccttttgaagacatacgggataagaaataagctgaaaattttcgcatccggaaagctgctcactccggataagattgccgttgccctcgcgttaggcgcggattttgtcaatattgcccggggaatgatgttttcagtcggctgtatccgcgctcaagtatgccacaccaatcattgtcctgtcggagtggcgacaaccgatccaaaacttcagcgcgcgctcagtatcgaggataaacagcaccgcgtctgcaactacgtgctctcgttgcgtgaagggctgtttcacctcgccgcggcggcgggcatcagctcaccgattcatttctcagctgaacacatcgtataccgggaggaagacggaagcctgagggaacttcccggccttttgaatcagcacgcataaaaaaaaccgcctgccgtcatcggcagagcggttttttacgtagctgaggaggattctcctttgtttacgcggtcaagcgccatttcataggcgtcgttaccgtaatttaagcatctcttcacccgggaaatcgtcgctgtggaagcacccgtttcgctttctattttgtgatacgtatttccttcgcggagcattctcgccacttccaaacgctgcgccagcgattggatttcattaatcgtacaaagatcgtcaaagaaacgatagcattcctccagatctttcagcgataaaatagataaaaataactggtccagttcttttccgcgtaatttatcgatttgcatcgtcaaacaccttctcctttactaatggaagctgcatcgagatcaggcacgatattaatccatgtctttcctggcacaaacggaagaatctcaccgccttttacgggcagaatacggccgtctttatattcccagtctgactccataacatcgccgtgctgaagcaggaggcccttcccccctgactgaatatcgatggcccgccttccatctttgtctgtcatgcgatggccggcttcaacaataaaaatgttgtgcatggctaaaggctttccggtctcccggtctgtcgctttcacaccatcagagcttcttgtataagcatcagcttttttatcataatcgtattcgacaagatttgtaatgttttgtgttccataatctatccgaatattgtaggtttcatttcctggttttgcatctgatgtctgaaatgggagcggttctgtttttccgttcagcttgtatcctttttgttccgccgccttcctgatattgtcatacgacgtgtaggaattgtggggcggcttgctgaaatcggctctccaaaacaggcttccgtcaaaatccaaaccgtttatataatcgtaagctccggactccagctgcttttttgcgccgggactccagccatgatggacaaatatgctgttaaacccgctgctgagcgtgacaaaatattccctcgcgctccgcacaggcccgaccgtttccggcatctcactttgaaaaatcgcgagaaaccgcgtaatccggccctccgcgagcgcttcgatgacaacatccgcctttgacagcccggattggggcctcgccttcggatgattgttcactgcgactgcaatcggacggcgttctgcaagcttctgctcagttttcagccccgttaaaggagcttccgcttctttcggctgcacctgatcggcattgttctgccggcaggcggcaagcagcaaaaacgcaaaacaaagcatacaaacggttttccatcttttcatatgtcggctccctgcttttatattttaacgcattatcgatggaaagagtacagtttttttcatcacgtcgaatattcctctcggcgtaatgcggatataaggcaggtgtgtgctctgcaaaaagagcagcgtatagatcggatcgcagaatcggtagccccgctcctccagcagcgtcctcagtttttgctctttctcaagcacttcttcatacttctccgcggatgcagaaccgtttaaggcgaggggaatctcatgaagaatcttcccgttttcggcaagcacgattccgccgccgatttctttcatccgtgagaaagcgagcaggatatcttctttattttttccggcagcgataatatctccggttgtcgtgtaggaactgacaaagccctgcacccgatcggcaaaacctttcagcattgtattgacccgccattttccatgcttatcgagaagcgtgagatagcattcatcatgatcaaaagaaagctggtcaacagaattatcaatcgcaatcatatacggctccataatgaccgcgttgcgcatcgtcacacccatcggcattgaaaactgtaaatcatccatcgtcatatcatatgaaagctcaagagggacgagaccgccctttttccaatccgtttctgtaaacgcattcatatttcggccgtcttctttcagcaggatgcctttggagatcaccgtgaccgggtcaggattcatcgggtcatcgagaatgttcaatgaagcaagccgtcccggaccgaccacaccgagatagtcgtccatctgataatacttcgcgatattaaaggaggccatattgtaggcatcgattgccggaactccttcctccaaagcgattttgattaattcattcgtcatgccgcctttataaaaatgcggcgtcgctccatccgtcgtgtagaagaaatgatcataatgccggaagcctttttgatggagatcctgcaaaatcgttctcaaatcagggcggatggatgaatgtctgagcgaaacatagtagcccaattcaagccgtctcatcacctcgccgccattcatcgcctcgtggtcggaatcagctccgaacagtttcatcttcgtcagtgttttttcagaggctccgggaaaatgcccttctatccgcttgcgcagtttctttgtcgcctgcatgcaatgaagcatcaggtcatcgccgtccatgaggcgcggccatccggtcaattctccgccttgaatgacatccgggtgctcaatccattgctttcgaacatcaaaagaaagaagctgatcctcattcagcacttcagtctgcagatcatatctggaccaccagaaatattgcaccggctgttttttcagttcttccaatatagtaagcgctttctttttaccgctgtgcaaaagaaaaaacaagttatcattaacaaacgtcgttgttccgaattgagacacatattcggcgagcgtttggggattatatatttgaaaaggatgtgtatgcggttcaatgtaacctggcacaatgtattttccttcacaatttatggtatgaatgtgctctgctgcatcaggaagctcatgaccaacatatacaattcgatctccgtaaatccagacattctttttcagccattgttttaaaaaaggatttaatacgagagcatcccgtaaaagtagcgttggaagcagctttgagtctacaacatccgcctgtgatctgatgtctttatttttccagttaaaggtgcgttcggacattcacatactctccttcgcttatattagacccatcgtatcacatccgcacaattatcgcacggctaaaacgttacaaattattgaagatgaatgaaaaactttttctaagggagctgaaatgatgaaaccgaatatcagtttattaaatgccgttatgcgcatcacttgcggcctcaccattttgtctgctgcttcagcgaaatacacgagaaaaccttggtgcaagatgcatctcttctgtatgatgatgggcgcgatgaaagcggcgtccggcatcctccgcttctgtccggcgacatatatgttccaaaccggaatgaatcaggatgacagccatcagcaagaaaaataacaagccgtttcggcttgttatttaatttctcctgtcccgcgagtctaagaagaatccgtctatacgccggaggacttcatcgatgcctgcgtgtcacacggcaagccgacagtcttagtcgtcttttcagaagaaaacccgcatcttatatgacgcggggttttcctctttatcgctgcgatgctttcagcgcacgggcgccgatatcgcttctgtaaaacagtccgggttttgtcagccctgaaacggcgctgtacactttatctctcgccgcttcaaatgtctcagcaaatgccgtgacattggcgacccggccgccgtttgtaacaaattgtccgccgtcttttttcgttccggcatgaaaaacggcgatcccgtcttcagcggacgtcaaactgccgatcggcgtccctttcgcatagccttccggatagccttcagaagccagcacaacgctgactgcggccgtatccttccaccttaggtcaacatccttctcatgcagaagatctaagagcacctgaatgaggtcggattccattctcggcacgacgacctgtgtttccggatctccgaagcgcgcgttgaattcaatgacttttgatccgttttccgtcagaatcagccccgcgtacagcacgcccgtgaaggagcgcccctcttttaccattgcttttgccgccggcttcacaatcgtttcgactgcgcttctgacgatatcatcggaaatgtgcggcactggtgagtaggctcccattccgcccgtattcggccctttgtctccatcgaaggcgcgtttatgatcttgagcgatgaccatcggatagacggtctccccttttacaaacgccattaaagaaaattcttcgccggcgaggaactcttcaatgacaacagatgcgctcgcctccccgaatttctcatcctcaagaaaatcgtgcaggcattcaatcgcttcttcttccgtcatcgcgaccgtgacaccttttccggcggcaagcccgtccgctttaatgacaatcggcgcgcctttttgctgcacatatgctttcgcctcttcaaatgaagtaaacgtctcatactccgccgtcggaatgccgtattttttcattaaatccttggcaaactgtttgctcccttcaatgattgccgctttttcagacggtccgaaaacaagcagtccggctttttcaaactcgtcggctatcccttcaatcagaggaacttcggggccgataatcgtcaggccgacatgatgttctttcgcaaacgcaatgagtgcggcatgatcgctttctttaatgttgaccagcgtcgcgcagtctgccataccgtcatttccgggcgcggtgtacaccgtgtcaacaagcgggctttgcgccgctttccaagccaatgtatgctctctgccgccttttccgataatcaatacattcacgcttcgttccccctcttaatgtttgaaatgtctgataccggtgaataccatggcgatgccgtattcatccgcttttttaatcgaatcttcatcgcggaccgatccgcctggctggataatcgccgtgacaccggcttttgcggcttcttcgactgtatccggcatcgggaaaaacgcgtctgatccgagcgcgctgccttttgctttttctccggcctgctcaatggcgattttagctgaaccgacgcgattcatctgccctgctcccacaccgaccgtcatatggtcttttgcaagaacgatcgcgttggatttcacgtgtttgacgactttccaggccaacttcaaatcttcccattcctgctcgctcggctctctttttgtcgggatgctgatgtcggcgtcatcaaatccatggacgtctaaatcttgaatcaaaaggccgccctgtacggatgtcagctgtttttctttcttccctgatgcggacacgtcaagcgtgagcagacgaaggtttttcttcgccgtcagtacgttcagcgcttcttcactgaaagaaggggcgataatgatttctaaaaagatgccgtgaagggcttcagccgttgcctgatcaacttcacggttcagcgcgatgatgccgccgaaaatggaggttttatcagcttcatacgctttattgaatgcttcctcaattgaagctcccgtaccgactccgcacgggttcatatgtttaacggcaacagctgcgggttctgtaaattcccggacgatttgaacggccgcatccgcgtccttaatattgttgtaagaaagctctttcccgtgaagctgttttgccgccgcgatggaaccggagacgggaagtgcgctttgatagaaaacagcctcttggtgagggttttcaccatagcggagcgattgttttttctcaaatgtaacggtgaattgctcagggtctttctcaccggcctcgcgtgttaagtaatcagcgattaatgcgtcgtatgccgcggtatggcggaatactttggccgcaagctcgcgttttcttttaagcgaaacaccgccgtgttctttaatctcattgagcacggagctgtaatcggccggatctgtgatgaccgtcacatcctgatggtttttcgatgcggcgcgcagcatgccgggaccgccgatatcaatgttttctatcgcttcatcgtatgttacgtcttctttcgaaatcgtttctttaaacgggtaaaggttgacgaccacaaggtcaatgggggcaatgccatgctcattgatctgcgccatatgctcttcattgtctcttacggcaagcagtccgccgtgaatattaggatggagcgtttttaaccgtccgtccataatttcaggaaatccggtcacttctgaaatgccgatgacatccacaccgttttcctgaagaagtttttttgttcctccggtcgaaatgacttcgacgccgagctctgtcagttcctttacgaaaggtacgagatttgttttatcagaaacactgattagtgcgcgtttgattgtcatgccttttcacctctgttatttagtcccagcagctgtttcacaacgctcggataccatttgtgctcaagctcgtgtattgtatgctctatgttttcaagcgtatcgttttcctgtatttcgaatgctttttgcgcgataatcggtccggtgtccatgccttcgtcgacgtaatgaacggtaatgcccgccactttcacaccggcccgatacgcctgtccgacagcgtcaatcccggggaatgccggaagaagcgagggatgtatattaataatgcggcccccgtatgcttcaagcagcgtatctccaatcagtctcatatagccggcgagaacgattaattccgccccgtgcaggcgcagctgttcaataacggcccgttcaaaggccgctttgttttcaaaagatgacggttcaaaggcgaatgacggaatgtgtaaagcctccgccctttccaccgcctttgcctgaggcttatccgtcacgagaagcgagagctccgcatcccacttctcttctctcatgcgtttggcaatggcctcgaagttcgatccgtttcctgaagcaaataccgcaaactttttcatgaaagagccgcaccgccgaaagaaatgccttcgccccgcttgacccggccgatcaaataagccttctcgccctgagcttcaagcgtgtcgataacgtctgtcaagtcctcttctttaacggcaaggacaaaaccgatgcccatattaaagacattgaacatttcttcttctttcagcttgccgtgctcctgcagaaacggaaaaatcggcgggatcggccatgatccgtgatcaatttccgcgctcaatccgtccggcagcatccgcggaatgttctcgatgaatcctccgcctgtcacatgcgccatgccgtccaccttaccgcttttcaccgccttgagcaccggcttcacatatattctcgtcggttccagcaattcttctccgagaggacgcgcaaacggttcatagacagtatccaaatcaagtccgccgtcatcaagaagcacttttctcacaagggaaaacccgttgctgtgaaggccgcttgaagtaagtccgattaagagatgtccctcttcgatatgttcaccggtgacgatttcgtctttttccgcgacgccgactgaaaagcccgcaatatcgtattcatcagccgtatacagccccggcatttccgccgtctcaccgccgataagcgctgatcctgactgctcgcatccgtccgccacgccctgaacgatctgctcaatttttaccggatcggccttgccgaccgctaaataatcaaggaaaaacagcggctccgctccttgggcaagcacatcgtttacacacatcgcgaccgcatcgacgccgatcgtgtcatgcttatccattgaaaatgcgagtttcagcttggtgccgacaccgtctgttccggaaattaaaacaggcttttgatacggaagctctgacagatcaaacattccgccaaaaccgcccaggcttcccataacgccgagccttttcgtgcgctccacgtgttttttcattcgtttgacggcttcatacccggcttcgatgtcaactccggcatttttataagcatcagacatccctatcactccttatcaattcgtttctccttaaaaggcagaaagagaaaggcagcctgaattcccgctgcctttatgtcattttcagattttattttgtcagcaccgcttcttttacgtgaggaagcactgtatcctgataaatttccgtcggatatttgcccgtaaaacaagcgaggcattgtccgcaattggtgtcttcaaattttcggccgactccttttaacaatccgtctacacttaagaaagaaagcgtgtcagcaccgatgatctggcggatttcttccacggaatgagaagaagcgatcagctcctcatgggttgatgtgtcgatgccgtagaagcacggatgagcgatcggcggtgaactaattttcacatgcacctctgtcgcacccgcttctctgagcatcgtgacaatccggcggcttgtcgtcccgcgcacgatggaatcatcaaccatgacgacccgttttccttcgacaacaccgcggacggcggacagcttcattctgacgccttgctcacggagagcctgtgacggctggataaacgttctgccgacataacggtttttaatgagaccgagttcgtacgggatgcccgttgcctcggcatagccgatggccgcagaaatactggaatcaggcacgcctgtgacgacatccgcttcaaccgcggactcctgggcaagcatttttccgaggtttttccgggcgctgtgcacgttaatgccgtcaatattgctgtcaggccttgagaaataaatgtactccatgctgcagatggaacggttgatattcatggagaaacgctctgatttcatgccttcatcattgatgatcagcatttcgcccggctctacctcgcgaaggtatgtcgcgccgaccacatcgaatgcgcatgtttctgatgcgacgacgtaagcatcgcccatcatgccgattgacagcggtctgagtccgttcgggtcaagcgctacgatcatttctgtttcagtcatgattaaaaaggcataagcgcctttcagcatagatagcgaatttttgatctgatccttcagcgaaaagtgtccgctgcgtttaatcaggtgagccagcacttccgtatcggaggaagtctgaaagatgctcccttggttttcaagctgctgcttcaactgtgtggcgttgaccaagttgccgttatgggcgagcgcgaggctgccgttgttttgcgaacggaataggagcggctggacattttcatatccgcctccgcctgccgtcgcataacggacgtgcccgatcgcgccttttcccttcactttgctcagttcgccgttttgaaaaacctcggtaataagcccctgtcctttatgcgccgtcagtttttcaccgtcagttgcgacaattcccgcgccttcctgtcctctgtgctggaggctgtgcaggccgtaatatgtgatctgcggagcttcttcatgtccccagatgccaaacacaccgcattcttcattcaggcctttgatttcagcaagcatggaatagctcctttccacgcgcgctcaagttctttcgtttgcgcgtgaaccaattgttgtccgtcctggttttgaatcgccagaagtccgtcagccgttacctcaccgatatgaaccgcatcggccacagccgcttcaaacgcctcatggtgttcttttttcactgaaacgacgaagcgggattgagattcagagaataataatgccgcttccccttctacagtcacgttggcgccaaggttttccgtcgtcatgacgctttctgcaatcgctacgcctaagccgccttcagacacatcatgcgctgattgaacaaagccttttttaatcgcgtcaagcaatgctttttggcgtgacagctctatatcaagatcgatttgcggcgctttgccgtaaatgcgcccttctgtcattttttgcagttcgcttccggcaaactcaggttttgtttcgccgatcacgtatacaagatcccccgcttgtttgaaatgctgtgtcgtaatatgagcggtatcttcaattaagccgaccatgccgataacaggcgtcgggtagatcgccgttccgttcgattcattataaagtgatacgttaccgccgatgacgggagtgctgagaacattgcacgcctcgctgatgccgtcggccgctttttcgatctgccagaaaatttcaggtttttccgggtttccgaaattcagattatccgtgaccgcaagcggttcggcgcctgagcatacgatgttgcgcgccgcttcggcaacggcgattttcccgccttcttcaggatcaagatataaataacgggcgttgcaatccgtcgtcatcgccagcgcttttttcgtgccgcggattctgagcactcccgcgtcagagcccggagcgaccaccgtatttgtgcgcaccatgtagtcatattgatcgtacacccactctttgctggcaattgtcggctgctgcagcaaggcaaaaagcgtctctgtcccatcttttacttcaggcgcgggaacttctgtttcctgaaactcgcggtagtacgcgggttctgctgacggcttgtggtatacaggcgcttcttccgccagcgcgtcaaccggaagctcgcaaacaacctctccgttatggcggaggcggagcattttatcatccgtaacatgacctacggaaaccgcttcaagatcatatttatcaaaaatatcgacaatttcctgttcacgtccgcgttcaatgacgagaagcatgcgttcctgagactcggaaagcatcatttcgtaagcggtcataccagtttcccgctgcggaatgagatcaaggttcatttcaatgcctgagccggctttgcttgccatttcagcactcgaacttgtcagaccggccgcccccatatcctgaatgccgactaaggcgtcgcattggatgacttctaggcatgcttccaggagaagtttttccatgaaaggatcgccgacctgcaccgcggaacgtttttcttcagatgaatctgacatttcttccgatgcgaaagtagcgccgtgtatgccgtcgcggcccgttttagcgccgacgtacatgaccgtgttgccgacacctttcgcctggccttttttaatatctttatgatcaattaagccgacgcacattgcattgacaagcggatttccctcatagcttgcgtcaaactgcacttctccgccgaccgtcggaattccgatacagtttccgtatcccgcgattcccgccactacttcttcaaacaagtacttcacacgaggtgaagtgagctcaccaaatcgaagagagtttaatacagctatcggacgggcgcccattgagaaaacgtcacggatgatgccgcccactcccgtcgcggcaccttggtatggctcaatcgctgacggatggttatgagattcaattttgaacacgaccgcctgattgtcaccgatgtcaacgattcccgcgccttcaccgggaccctgcagcacgcgttcgccgctagtcgggaatttgcgtaaaaccggttttgagtttttatagctgcagtgctctgaccacatgacggaaaaaatcccgatttccgtgtagttcggcaatcttccgataatagattcaatgagtgcgaactcgtcatcactgacacccatttgctgatagagtttctcttcttttatttgttctttacttggttcaagcagtagcgacatgagtttccctccaatttttcacgatagaccggaacaatgtaagaccgtctgcgctgccgagcagttcatcgactgcgcgctcagggtgaggcatcatgcctaatacgttgcctttctcattcacgacgccggcaatgccgctgacgcttccgttaatatcgccgccgtatgtgaaggcgatttgattgttttcttttaatctttcaagcgtttcgtcatcacagtagaaattgccttcgccgtgggcaaccggaatcgtaatcgattgtcctttttcataggaagatgtgaataacgtaccgccgttctgcacgattaattcaaccggtcggcagatgaactttaaatctttgttgcgtctcatcgcgccgggcagaagtccgagctcctgcagaatctggaatccgttgcagacgccgagaaccggttttccttcggcagccgcttttttcacagccggcatgatgtttgcgaatctggcgatggcgccgcatctcaagtagtcgccgtatgaaaacccgccggggatgagcacgccgtcaaatccgtcaaggcttgtttcctcgtgccagacatactcgacttcttcgccgagttcgtcctttacggcgtggaacatatcaatatcacagttggagccgggtaacacaatcaccgcaaatttcactgtgcgacaacctcctcaacttcatatcggtagtcttcaatgactgtattggcaaggagcttttcacacatttctttcacgagcgcgtcaagatcgcggtcagatttttcaatcgtcagctccatatattttccgatgcgcacatcctgcacttcattgtaggtcatgctgtgcaatgcatgctgcaccgcgcttccttgaggatcgagcacactttcttttaagctgacataaactttcactttatacattatgaaatgcctcccagtcttttgaaaatctcttcatatgcgtcggttaagcttcccaggttccgtctgaacaaatctttatcgagcttttcgtttgtgtctttgtcccacagacggcacgtgtcaggagaaatttcatccgctaaaagaacccgtccctctgcgtctaagccgaattccagcttaaaatctattaatctgacgccgcagtcttcaaaaatatgctgcagctcttgattcacctgttttgtaatcgatttgatcgtttccacctgctcaggagccgccgcttttaaaagccagatatgatcttctgtgatgagcggatcgccgagtgcgtcatctttatagtaaaattcgataatcggctgcggaagctctgttccttccgggatgccgaggcgtttcgacatgcttccggcggcaacgtttctgaccacgacttcaaggggaatgatgctcacttttttgataagctgctctgattctgaaacacgctccacaaagtggttgtcaattcctttggcgtgcagatgtttgaaaatcaggcttgaaatttcattgttcagacggccctttccgctgatctccgcttttttctcaccgttaaaggctgttgcggaatccttgtagaccacgcggagaatctgttcgtcttcagtttgataaatccgtttcgcttttccttcataaagaagattattgttcacaatattcacggaaggcctcctaacccgaatgttgggaatattcaatctatggcggctgaagaagccgcctccggctggcttcttctataaacctaaacgctcaaagatcaagtcgacgtttttcaaatgataattgtagtcaaagcaatcggcaatctgttccggtgtgagacgggacgtgattttttcctccgcttcgacaagctggcggaacggcacttgtttttcccacgcttccatcgctttcggctgaaccgtgtcatatgcttcttcacgaggcagacccgtgtcgattaaagcgagcagcacgcgctgagagtagattaaaccgagtgtgcggtccatgttgcgtttcatattttccgggaataccgttaagtttttgacgatattgctgaatcggttcagcatgtaattcagcgcgattgtcgcgtcaggaagaatgatgcgctcagctgatgaatgagaaatatcacgctcatgccataacggtacattttcgtatgccgtcagcatgtacccgcggatcacgcgcgccatgcccgtcatattttccgacccgatcggattccgtttatgaggcatagccgatgaacctttttgtccttttgcaaaaaactcttccacttcacgagtttcactcttttgcagaccgcggatttccactgcgaatttttcaatgctcgtcgcgatcaaagccagtgccgccatgtaatccgcatgacggtcgcgctgtaatgtctgagtcgaaatcggcgccgctttcaggccgagtttttcacagacatactgttctacgaacggatcaatatttgcatatgtgccgaccgcgccggaaagcttcccgacttcgatcccttcttttgcctgcttgaaacgttcaaggttgcgtttcatttcttcgtgccaaagcgcgagtttcaggccgaatgtcgtcggttccgcgtgtacgccgtgcgtgcggcccatcatgaccgtgtatttatgttctttcgctttttcttttataatgtcaacaaatctctcaatgtccttgagcaagatctcattcgcctgttttaatagataggaaagagcggtatccacgacatctgttgacgtcaggccgtagtgaacccattttctttcttcgcctaatgattctgaaaccgcgcgggtgaatgcaacgacgtcatggcgcgtatcctgctcgatttccaaaatgcggttgatgtcgaaagacgcgttttcgcgcatgactttgacgtcttctttcggaatgacgccaagctcagcccaggcttcacaggctaaaatctcgacttccagccatgcctggtatctgttttcgtccgtccagatcgcggacatttcaggtcttgaataacgttcgatcattatgctcgtcctccgtctcttttcatccatatgttcgtgatgtcctgaatccatgtttcatcaggcttccgtaaaaatgtcatatgccccattttgcggccttttttaatctcatgttttccgtacaggtacagtttggcttcctttaaaagctccatatgctcctccgcaagcttcacttcatcaccgagcagattcaccatcattcccggtttgagaagatcggttctgccgagaggaagtccgcagaccgctctgatgtgctgttcgaattggctcgtttcacaaaggtcgagcgtataatgcccggagttgtgaggacgcggcgccagttcattaatcaaaaggtctccgtcttccgtgacgaacatttccaccgcaagcggcccgacaagttccaatttctccgcgagctgaacggcaagcgcctctgcccgcttttgaaccgtttcctccgctctcgcgggtacgatgctttggaacagaatattatttttgtggatattttcagcagccggaaaggttgaaatctcaccgtgcaccgatctcgtcacgataacggaaagctccatccggaacgatacccagctttcaagtatgcacgtgccgttttctaacagcacagccgcttcatctgtctgtccttcttccttaatgacaaattggcctttgccgtcatatccgccgcggcatgttttcagcaccgccgggagccccagtgcctgaacggcttcctcaagctcccgtccgctgtttacgatccgataaggcgcgacttgacagcctgctgactggatcgcctttttttccgtttccctgttttgggtgatgagcagcagctcgcttccctggggaagatatgcatgttctttgagccagttgagcgcctcgtaatcgatattttcaaattcataggtaatgatgtcactgactccggccaatttttgaatcgcttcacggtcattgtactgggcggtaatctcaatatcggcgatctgtccgcaaggcgagtctttcacgggatcgacgacagcgactttatagcccatttgttttgcggcgacagccatcatttttccgagctgtccgcctccgataatgccgatgacggcgccggggtaaatcgtttttttatcagacaagctgatcactgctttccagcaccgtttgttttgtcgcatttcttctcgcctctagtttatccgcaatgtcatcgtcaaatgccgacaaaatttgcgcggctaacagacccgcgttcactgcgcccgctttcccgatcgccgtcgtcgcgaccggcacgccgccgggcatctgtacgatagacagaagagaatcaagcccgttaagcgattttgtctgaaccggtacgccgatcaccggcagcgtcgttttggccgccgtcattcccggcagatgcgccgctcctccggctccggcaataatgacttttaagcccctgtctctggcgctttctgcatattcaaacatcaaatcaggcgtccggtgcgcggataccacctgtttttcataaggaatgtgaagttcgtcaagtatgtcgcatgcatgtttcattgtctcccaatcggaagtgcttcccatgatgattcctgctagcggctgcattctgttcccaccttctcatgctttgtttttcagaaaaaaaagcccggcttatattgcaactatgaggaagcaatacaaaccgggcatggcgcgcgtatcgtcagtcgttcgcttctgcgatatccatgtcagctgtttatcactttcctgcatagtccggccgtttacggcagccgggtagaaacttatgggccatattcccaagattatatgaggtcgtgttttgatttcatgtttatcttaacaacggacttggataatgtcaacgacattatcgaacgatataaaaattctttcttttaatgttcgtgtttagatcaatttcccttcaaatacgatttttttcccgcaaggaacgacttgaattgatccattttctttcttttctgtaaagatcggctcttccatccgccggacgggcatataaccctcttccttcattaaagtgagaatggtgtcaatcgtttcatcttccgttacttcaaaccgtttcttttttggctttgtcattccttaattctcctcttcttcactgctttcacccagaatccgccgtggatcgttttcggctcaaaggcgatgataaacgctttttcatcaagcgttttaatcgtatcataaagctgaagctcatatttgcgcggcgtcagaatctgcatggcggtccggtctccttcaagtccgcccgcaacccagcttgtaaccccgtatcctttttcccggagctgtttcggcaggtccagatcgagctccttcgtaatgacgttgactgtaatatagccgagcgccagtttttcctcaattttcattcccactataacaccgatgccgtagccgagcgcataggcaatgacgttttgaatttgattcagattgccgagcacaagactcaggccggtcacatacacaaggatttcaatcgtactgatgcctgcggcgaaatagcgctgtccctttaatgtcagaatcatcctgatcgtaaagaaagagacatatataatgttaatgatgagaataatgagaaccatacctatactgttggataaaatcgtctgcatcactgattcccctcctctgatactttgaaaagcatcaatccttcaattaaggatagtttaccctcttttcatcattttcaaaagaaaaaaaagcccgccccgcaaggcagactttcaagctcttatcagtgaagctcggcttttttcaatcgtttgacggcttcatattccttctcaagttcactcagcgtgtacccggacagttcctgaacatggtcttgataaaaccctgagcggatcagttttgtcctcaggtgctgttttttccgattaatggcttctcgcaacaacggggccatcttcatcatccctttccgaatcataaagagtagtgccgctttcgaattgctgttgctctcatcatatctcggccgggtcctcaaaacaacacgctttattagaaaaatttgtaaacattgtgaaagacaaatttcgacttataaagggatcagcgaagcagtaaagtactctgaaataagcggccatgtcacagccgtaaaaatgagcatgatgataaccgccgcggaaatacagtacatcacgtcagccgcaggcttttcagccgatttgtatagaatctgcacaaactgcaccatcgccgaggcggccagaaacaaggtcagcgccgtaaacaccacggtgatgaccggcagattcaataccgcgaaaatcatccacacgatagagctggcgacagccggaaccaaaagcgatccgacccccgcggccgcatcccgcatcgtgattttctgtttcatcatatagcgagatacaagccagaccgcgcccgccgcagcggcaaaaaagacgagcgtatacacgagaacgacggtaaagccgtcaaaaaacgtatgatgccgctccccgtatccgagaggcctttgctggcttgccctcagctgaaaccaatttccgattgagaaaaagatactgaatacaagcattgaaataagagcatatttaaagcgggaaaagccgtcttccccaacgaccttcaccggtgatgtcaaaatgcgcagcgcgaaacggcaataacgtttgaccgcggcccatgcagaagcgagtttttccgtaaaagccggagccgggcgccgttccttttcttttttcttttgcttttgataacgtcccgcatttctggacattctcgacagcggttcttcatcagttccctgatgctgtttttcttcttccaacgtttcttttctttcttccgtcatgtcagcaactcctatcaaaaaaatacggcggaatttgttaaacaagaaaataaaacacttatataaggtaccgaagcgtcctcaaacagtcaagcggttttcttcacccggacacccacatgacgttttatagtatgtattggttttacggaataggacaaaaacaaaaaaccggcttaactcagccggtttttccgttatttcaagaagatgaaatacaggataaagatgacgaacagtccgtacataatcgggtgaacgctttttccttttcctttgcagatcattgtaatcgggtagaatataaaaccgatcgcaatccccgtcgcaatgctgtacgtcagcggcatcataatcatcgttaagaatgccggcacagccacctcgaatttatcccaggcgatcttaccgagcggcgccaccatcagcgcgccgacaataattaaagctggagccgtcacattcgtggtgacaactgacagaagcggcgagaaaaacatcgccagcaaaaagagaatgcccgtcacaacagccgcgaagccggagcgcgcccccgccgcaacgcctgagctggattcaacataagaagtcgttgtagacgtaccgagtacggctccgataacgattgatgttgaatccgccagaagcgctcttcccgcacgcggaagtttgttttccttcatcagcccggcctgtgtcgctacagccaccagcgttccggccgtatcgaaaaacccgacgaacaagaaagttaaaatgacaatcagcatttggacggagaagatatccggaagatgcatccacgcctgtccgaaagtcggcgcaagactcggcacgctgccgacaatgtgcgtcggaaccggaatcagtccgcagaccatgccggcaaccgccgtcagaagcattccgataaatacgccgccgtttacgcgaagcaccatcagaatgaccgtcacaataacaccgaaaaccgtcagcagtacaggaccgctgtgaatattgccgatagacaccaaagtcgatgagtttgcttcaataatgcccgaaccctgcaaaccgacaaatgtgataaacaaaccgatacccgcgccgaccgctaatttcagctcaggcggaatcgcattaatgattttttcccgcaatcccgtcagcgaaagcgccacgaagataattccggaaatcaagacgccggaaagcgcagcctgccatgaaatccccatgccgaggacgacagagaaagcaaaaaacgcatttaatcccatacccggcgcaatcgcgatcggatactttgcaatgagccccattaaaatacagccggccgcagacgccaaggctgtagcggtgaacaccgcgccctgatcaatttttaatgcttccggaaatcctttcacaccgtttaaagacaatgtcagcggattgacgaacagaatgtacgccattgacaaaaaggtcgttaaaccgccgatgatttcattacgatagcttgtccccagctcatcaaactgaaaaaattgcttcaagccaattgcctccttcattctctcccatttattctgcccgttatccgccaaataaaaaacgccccaaatacatttgggacgcttgactacatacgttcagtctgaataaataagaatggattatttatatcaaacgattgagattgatccgtagtcaagccatttacggtagcttggtagaaacttgcgggccatatccccgccattatacgatatctgcatatttgatttctgagtctattgtatcaattcaattttgaaaactcaataaaaaaaacgaacaatcccgttaaaaaaatttggtttattcgttaattgaccaaaaatggaagacggcaaaagccgccttcccgacatcattttccgtcggcaggcccgaccggcaccgcgaatgtgatcttgctgtcacctgctaaaatgttcatggccgtttgattgacgtacaaagcatatgaatcgaatgagaaatcgcgcaacgaatagtctttatcggatgaatcatccaattcaaaaacggattccatttcacccgttttaaggttcgtgactttcgccttattccctttcagataatagccttttttatactcattaagcgatggccaggttttcatttttttcgtattgccgagaccgatagactcaccgatattcatcagctgatcttcatccgccttgcttacatcaattccgctgaattgataatccacaattacccgtctgccttgctgtttgatctttttgacggtaatgccgacatgatgatgtttcgtttcataactgacgggcagttttgttttcagaggcacgatttctccaggctctgattctgtttttatatcgcccgttatgaaaagtgttttcgctttcgggtctatcggtttgctgaattgagtttggccgcgtattcttttcccgccgccgggaagattctttctgccgccaagttcaatattcgacgccgtcatttcataatggtttccggcatcatccgttgcctcgtcaatcgagatggcatcatttttggctgcatcagagaagtcgatagaatacaggagagccgatcccatcgttccgttttccgcccggatatcgaaaaagcggtataatccgtgatttacattcacagctttcgttccttcaagagaaacggacttttgttttttgatcggaagtgtaaagcgccagtttccggggatatccttgatttgtgtaatgacaagcggaagcttatcaccgtctttcagctttgagccgtccgtgaacaggcgaagctgccccgcgtaccgcccgtctttcatttttttcatatcactgctgtcataatcctctgctaacatattccgtggatctttataatcaacttgaaaagagatgctctcctcatctgatttcaaattgtcaacggtaaaattgtaaacgagctgtccgctgtcgtaatacacacttttcactgtcaccgtaatcccgcgtgattccgctttctcattcagttttgtcaccaaattgcttttaaacagcgcagaacctgccttatcctgaaacagactgtaaatttgtccggcaacaggaatgtttcccatagccgtgttaacggagggcatgaataagcctgaggacaaatacagaataaacaaagcagcagcaaccgcgagtccgtttatcacttttcgtccccatctccgtctgacggcgccttcttttccggcacggacaacagcgctggatatcacgtttttcaactcagctttcggcacgtcaatgtcctgatacaattgcttcatttgatgcttttccatatatgttcctccttttccagctcctgcttcaatgcttttctcgccctgtggagatgcgtttttacagtgccttccgccataccggtctgttcagcgatcatagcaatcgagaaatcttgaaaataataaagctgaatggtcagctgtatatgttcgtcaagcgtttccagggcattccgaagatctatgtattcttcaatgttcttattctccgcgcgtgtatcatgttgcggctcaaacgggatgacgtctccgtgctttttcctcatcgcaaaaatcgtatgaagcaaaatccggatcagccacgttttaaaatatttcggctccttcagctgcgcgatatgaagaaaagccttgtaagccgtttcctgaacagcgtccagtgtatcttccttgtgatgcaaatagagataagctgttttatataaagtctcctgatgagctgtgatcagtttttcaaaggctgcggcatcaccttttttcgcctttttgatcaatcgttcttccttcaccttatccacctcctatgctgttagatatgaatcagggcaaagcggtttcaaaaagatgaaaaaaaacgcctcttttttaaaagagacgtttttttatcttcatttattcccactcaatgctttctaaacattataagaattaatttattgaatatcaagccttttggggtttgtagttccttgatttagaagttaccattaaaaatattgctcccccgtgttctgaatattatgggagggggtaaatactgtgatttagtgttttagttgaccttataataaaaaaagcgcactaaatcgaattgaaaggtgcaaaaacatgattacaaatcaacaattagtcataaacaatttggaagaaaaattaaaatcatttacccatacagttagcggagagcttacaaaggaagaagatttcatcatagcaaatacaaaaatccccactgatacattcaatgtaatattaccgaaatctccaaatatcaaaaatacagttaagatcagacatggaatcgataatttttcatataaaaaatatccctttagtatatggattgatgctcagtatttaactgaggattggacaaaacttatacaagaatatgatctaaaagaagcggaacgtaatgtaatgatgaaacttgaaaatactcttaatgttgggcaaagaatttcccatcagcttatgattactgctgtgaaaaatgatgaagaacttttaaaatatatagacatattcacgagcttatttgagggtacaccagaaaaagatgcactagaaagttattttaatacgttttcacaagtaaaattaggttcagaagttcagatgtttattggatgcatagatgaaatgcctgtaactaccggtttattaatagaaaccaaagatagctatggtatttatgatgtgatgacaaaagaaacatttagaggtaaaggaattggcagtgaaatgtttcaatttcttctaaatcaaacaaaggataaacaaaaaccagttgtattacaggcttcagaggatggaaaaaatatctataagcgatttggatttatagatgtcggagaaatggttgtatttgaatagagggtttctttaatttgcttaatttgaacaaactttattctaaaacaacattaattattatcccattgtggaatactttttctttaaaattcacgattcaattaataatattggatcaattgttgctataaaagaaaaaagagcttagaacccttataaaccaaggattctaagcttcttttgactattcccactcaatcgttgcaggcggcttgctcgtaatgtcatacacgacgcggttgatgtgtttcacttcgttgacgatccgtgtcgaaatcacttcaagcacatcccaagggatacgcgcccagtcagatgtcatgccgtcaattgatgttacggcacggataccgattgtgtaatcatacgttctcgcatctcccatgacgccgacgctgcggatgtcaggaagaaccgtgaagtactgccagatgtcgcgctcaaggccgtgattcgccacttcttcacgcagaatcgcgtctgattcacgaacgatttcaagtttttcttccgttacttcgccgagtacgcggatgccaagtccagggcccgggaacggctgacgccatacgatatcatccggaaggccgagctctgtgccaagcgcgcgcacttcgtctttgaaaagggtgttcagcggctcgatcagttcaaactgcatatcttcaggaagtccgccgacattgtgatgcgatttgatcgtttgcgccgttgcagtaccgctctcgataatatccgtgtaaagcgttccttgcgctagataatcgatgcctttaagcttgtccgcttcatcatcaaatacgtaaatgaattcgttgccgatgattttgcgtttttgctcaggatcagaaacacctttcagcttgtttaagaatctgtctttcgcatcaactttaatgacattcatattaaagccttcgctgaacgttttcatgacgccttccgcttcgcctttacgaagcaggccgtgatcgacgaaaatacaagtcagctggtcgccgatcgctttatgaattaaagcagccacaacagaggaatcaacaccgccgcttagcgcgcaaagaacctgcttgtctccgactgtttcacggattttttgcatttcgatttcgataaagttttccattgaccatttgccttcacaatcgcaaacgccgaatacaaagtttttcagaagatcattgccgtattcagagtggcgcacttccgggtggaactgaacgccgtaccaattcttgtccgctttgctcatcgctgaattcggacagtgatggcttgttgcgtcaacagtgaagccttctggaacttctacaaccaaatcgccgtggctcatccagacaacttgttcttccggaagatctttgaacaagtcaggagttccttgaatctgaatgttggcttttccgtattcgcgctggcttgccgcctcgacttttcctccgagataatgagtcatcagctgcatgccgtagcagatgcctaatacaggaatatctagttcaaagattttttcgtcacagcggaaagatccttcatcatatacactgttcggtccgcctgaaaggataattccttttggattcatttctttgatttcctcagctgtcaacgtatgggggtgcagctcgctatatacgccaaattcacggatccggcgggtaatcagctggttatactgactgccgaaatcaagaacaagaatcatttcattcactaacttcgtcatggttgtcacctaatctcctctaagtttttgacacagaaaaaacggaggacaaacgttcagccctctgtcgcgcaagacttgtccggaagcccggctttttaacgctcccgggctcccatttaacattcatttattctaacaacaggacgatatgcggtcaagactatcttgttttaattatattttcccacaactgtcccgattcattccaaagctccgctgcattatccctgcggtataaggcccgctcatagagcagcgtcagctcggacatgtcgtttgtatggtacgcctcgtcaatcctcgcggcaaaatcgcgcagtgtttctccgtctcccctgctgaatccttttcgtttcagctggcggagcagcgcggcatatgcgtcgaaaaagacgtcttcatccgtacgccgcttcaatctggctgctgtaacgtgcggaatccagcgcgcccggagcacccaggcgagtgccgccgcggctgaaatcacgatgacgatggctgcatacggccatagctgtgccgcggttttgttgtggatcacaggctgcggtgccgcgctgtgatcccgctttttcggcttttcctctttttccggctttgtttcctgacgctgcttgtcagacggttcatccgaatttcccgctgagcctccgctgtcttttgccgccgtatgattttgctctgacgtaaactccgtcggattggtgaagccttttgtcggctcaaacgtcacccagccctgatcgggaaaatacacttctacccacgaatgggcgttgttgtttgtgacttcataaatgtggccgttatggtcgcctgcccctttatattcgccggatgtatagcccttcacccaacgggcggggattcccgcagagcggagcagcacggccattgccgatgaaaagttatcacaatatcctcttttcgtttcaaacagaaattgatcgacataatcctgattgtgctccggaaccgcgacatcctgtgtattatacgaaaatgcggaagatccgagataatcctcgatcgccttcgctttatcgaacatattatggtgatcccgcgtcagtctgtccgcaagctgtctcactcttttcggaaggctgtcggggacctgtaaataccggtcattgaattgattctgctcacggtatcgtttcactttcacttttctgagatcattcagcttaaagacgggcgcctgaaaagtcaccgtgtaccgtcccatattgcggatgttgcccacttgttcactgaccggcgtaatttgctcggtgtttccgttcatttcaagctgaatcgagtgcttcggtttaatattggagacgccgatcggatacatgacgtgattatagagataattttcatcaatggacacctgtgccgtataccgtctcgtctgcacactccggtcaaaccatatatcttccacgttgccgccgttcagtttataggacatgccctgatcggtctccacccagcctttccccgtgtatgtatccttcgtttccacccggaagtacgcccgttcttttcccttccatgtgaaaaccggcgtatcatcctgctgaaaagggccgcccaatgtttcatcatgattgccgtagccgattttgctttcggcggcgggcacttctttgtggtttgttatttttttaagaaacggcacggggtccggccagttcgggtctgatttcggagccgccagaccgaacacgacggaagcgcagataaacagcatcagcggcagaaaccatttgagtatcaatctttttttaaacgctatgtgttccgtaagccggatgcgctccatatacaaaagccccatcatcaaaaagccgataaagacgatccggatgacggcgtacgcggcatcataaggagtaaacgtatcaagcacggtgatatacgccaccgtcatgataaaaaagaataatattttccgctgatagatcacccagtaatgcagcaaatacacgagcagccataaaagcacaaaaaacagcaatgtgcggaatgacggattcatatcattccatcttccggacccgatgtggcgggcattttgcatcacgtcccgcaaaaaagaaacgagccattccggctgaaaaaccgaacctttataaaacaagatatgaatactgatcaacgtaaacagaatgcaggacggcacggtgacgtaccacctcatccggaagaatgacagcagaaatgccaaaccgataaaaacgatgaaaaaaccggtatgttttgtatctgtaaaattgtgcagcggcctgagccattcccataacaataaaaaagcgagaaaataaaacagcagcagactcagcctgcttccctggttctcgtcatgcggcatggcgcgccacctctctttctaaacaacatgggacacccgtttgtccctgatcatttgcaccttaatatttttttgagcgaagatgagagcgagtttccgttctttctccgaaagcgcggcattcgtttctttcgccaaaaacaccgtcatgtcagcacggccgggctcagcctgtttgagaaggtcttctgtaagactgcccgtcacgacggcaatggaagctttgcggacgcgcggatccgccagctcttttcctaaacgcccgcctgcatcggcttcttccgattctgaagctgatgccaggtaacgcagcatctttctgaaatgccggtctccctcccggacgggaaatacggtccggtcgctccccaatgaaataaatcctgcgggagagcccttcacaagcgccgtgtaaagcagggatgccgaagctgataccgcggcttcaaacgatggggacggcctgcagtccaaaaggagagtcatattcacactctgcagcgggtcaaattccttcgtcatcagctcatttcgccgcgctgatgttttccagtcaagtgcggaaaaccggtcgcccggctgataatttctgacgctcgcagccattgcggagcggtgtacctgaaacggagcgccggcagccgcaccctcttctccggatgcggcctgcggcttatagtgaacagacccgtacgccgggaaaaccagaaccgtatccgtaacggaaaacgacgccgtcttgtccaaaagcccgagaacatctcccgtccgcactcttatcgtatgtaaatgatgctctccgcgcggcacctgtggcagctcatattgtaacgtcagcttcctttgaaaccacggaaacacgagctgtttcgcactgcgcctctcgccaagcgtttccggcatcacatcttcaatgaccatatatgtcagcggaaacggcaggcgcctcgtcagcctgatggtgacagacagcctgtcgcctgaggttaactgggcggaggacacgtcacgcgtcacctgaaacgcccgcagcgggtacacagcgaccagcccggcgtaaacggtaaacggcaaaaacgcataaaataaaaaccagctcacaaatccgccctgaaacatggcataagaaaagacagccgccgtcagtaaggccaacataagcagcttccagccatatagaagccaatgcatcttctttctcattagcggaccgacatcctttgaacgggcactttttccgtttgcatgatgtcttctataaccgcttccggggtcacatcgttaaatttcgcctcggcggtcaagatcattctgtgcggcagcgtatacggagccaaatactggacgtcatcaggaatgacgtaatcgcggtcatgaagcagcgcgtacgcctgcgcggctttcattaatgagattgaaccgcgcggacttacgcccagatgtacggacggatgccggcgggtatgctgagtaatgccgacgatatacgctttaattccatcatccacccgcacctgctccaatttttgctgaagactgataaactgttctttagaaatgacgggctcgattgtttcaagcggattgcgcccttcctgcaaagacagaacttgaagctcttcctcggcagtcggatagcccatgcgcagcttaaataaaaaccggtcaagctgggcttcgggaagcggatacgttccttcatattcaaccgggttttgggtggccatgacgaaaaacggctcagccagccgcattgtctttccgtcaatcgtaacattcccttcctccattgcctcaagcagggaagactgcgttttcggagaggttctgttaatttcatcagccagcacgatattccccatgatcggtccagggcggtattcaaattccatcgttttcgtattataaatagagacacccgtcacatctgacggcagaagatccggcgtgaactgaatcctcttaaagtcagctccgatcagcttggccaaagcgcggaccatcatcgtttttccgactcccggcacgtcttccagcagcacatgcccttttgcgagaatggcggccagactgagtatggcgatatcccgttttcctatgatgatgttttcaatatgctcaacggctttctccagcagcggatgcagctcttctttataagccattcttctcctcctagtcatctctcaaatttcaattatcgtaacctaactttaccacaaaatataaacagtataaaaaaacgtttccagcgaattgtttccagtctgaaaaaggaaaaagctccctttagaaaggaagctttatttcagctggagaggctccatatgaatgtgtgaatggtcaatggcatgttcatctttcatcttgcgttctacctcatttgcgatctcatgactctctctaatgttcagatctgacggcacttcaatgacgacatcaatatgaacggagctgcccagatatctcgctttaatatcttttaaacggctgacgcccgcaatctgttcaatcgtctttttataatcagaaatatgtttgacatcaaaaccgtcagtcagcgaatgagaggattccttaaaaatatcccacgcggttttgcagatgatcaacccgatgataaacgcggtaaccgtatccacccaagccaaatggaactgtgaagcaaaaattccgataaacgtgccgatactgacgagcgcatctgatttattatcagcggccgcagctgaaagggcctggctgtttacctttttggcaagccctttcgtatagcggcagaccatcagcatcacgacggcgctccccgcggccgtccaggcggctatcatatccggtgtttcctctttaacggaaaaaatagattgtgcggcgctgaacagcacttgcattccgacaagcatcataataatggaagcgatgagtgacgcgacggtctcggcccgaaaatggccgtaaggatgatcttcgtcaggaggtttctgagagatgcgcaaaccgatgaaaacagccgcagatgccgcgatatcagtcgcattatttaaaccgtcggcctgaagcgcttctgagtgaaacaaataaccgatcacaagcttcacagccgacaatgccgcatatgcgccaatactgacaatcgctccggtttcgccttttttcaattcatgatatctctccactgaaaatcctccttcccgttcaatttttccttcattatcatacaaagcgaggacacagtgggtctatagaaacatgattcactttccacagaaaaatagtaagcatagaacatttatgcgctcaggaaacttatttttattcacgaaaaacctctcatcccaatcgtatcaaggattctcgccaacccatgttcatggaattattttcaaacccattaaaacacaaaaataacagaaaattatttcttttccttccggcaccttctgctgtacggacgagaaaaaatgtcatattttcttacatcattttcaactgtctgtggcatttatgatagaataatacttgtcggaatattcagcataaacaagccaaaaggaggcaaagaatgaatcagcctaactctttatcaaagggattaaaaacccggcatatgactatgatttcaattgccggcgtgatcggcgccggattatttgtcggaagcggatccgtcattcattccaccggacccggagcgattgtctcctacgcattagcaggactattagtgatttttattatgagaatgctgggggaaatgtcctccgtcaacccgacaagcggttcgttttcacagtacgcgcatgacgccatcggtccttgggccggttttacgatcggatggctgtattggtttttctgggtcatcgtcattgccattgaagccattgcaggcgccggaatcatacagtactggttcccgggcattccgttatggctgacgagtctgcttctgaccgtgctgttaacactgacgaatatttattcagttaaatcgttcggcgaatttgaatactggctttccttagtgaaggtagcgacgatcgttgtcttcttaatcgcgggatttgcgttcattttcggaatcgtccccggcagcaaaccggtcgggctggaaaatctggcgggcagcggcggatttttccctaaaggtccaagttccgttctgctcggcatcgtcgttgtcattttttctttcatgggatctgaaatcgtcgcaatcgcagcgggagaaacgtcaaatccggtcgaatccgtcacgaaggcgacccgctcagtcgtttggcggatcattattttttacgtcggctccattgcggttgtggtcacactgctgccgtgggattcagccaatattttggaaagccccttcgttgccgttttgagccatatcggggttcccgcagccgctcaaatcatgaattttatcgtcctgacagccgttctgtcctgcctgaactccgggctttatacgacgtcacggatgctgtattcactggcagagcgaaatgaagcgccgcggcgttttatgaaactgagtaaaagaggcgtaccggttcaagccattatcgccggcacctttttctcctatattgccgttgttatgaactacttttctcccgactccgtatttttgttcctggtcaattcatcaggggcgatcgcactgctcgtctatctcgtcatcgccgtctcgcatctgagaatgagaaagaaaatcgaacggacaaaccctgaatctcttaaaatcaaaatgtggttttatccgtacttaacctacctgacgatcatcgccatttgcgccatcttgttatctatgctgtttatcagttcaatgcggtctgaatttctgctgacaggatttattactctgctggtacttgcctcatatgtattccgcaaaaaacaaaaaccgaaagagagcgcttccgaaagccggattgcgcaataaccgcaaacacccccctcaaaaaagggcgggtgtttttttaaccaacctgttccaggcagcattaactgtagtacaggatttcaataaatgataaggacaggatgaaaaatggcactagaaaaatttgcagatgaactgccgattatcgaaacactccagccgcagaagaaatcagacggcagcacgtattatgaagtcaccatgaaggaatgctttcacaagctgcaccgcgatctcccgccgacccggctgtgggggtataacggtttatttcccggcccgacgatcgacgtgaaccaagatgagaacgtctatattaaatggatgaatgaccttccggataagcattttctgccagtggatcataccattcaccattcagaaagcggccatcaggaacccgatgtcaaaaccgtcgtccatttacacggaggagcaacgccgccggacagcgacggctacccggaagcatggttcacaaaggattttaaggaaacgggtccttattttgagagagaggtataccattatccaaacaaacagcgcggggctctgttatggtatcacgatcacgccatggcgattacgaggctcaatgtgtacgccgggcttgccgggatgtatatcattcgcgagcgaaaagaaaagcagctgaagcttccctccggagagtatgacgtaccgcttatgattttggaccgcacattaaatgacgacggttccttgtcttatccgagcggacctgctaacccttccgaaacgctgcccgacccttccatcgtcccgtttttttgcggaaataccattctcgtcaatggtaaagcgtggccgtatatggaagttgaacctcggacatatcgtttccgcatccttaatgcctccaatacgagaacattttctctctcgctcaataacggcgggaagtttatccaaatcggttctgacggcggactgcttccccgctctgtcaaaacacaatctatcagcttagccccggcagagcggtatgatgtgctcatcgatttctccgcctttgacggagaacatatcattttaacgaacggcaccggctgcgggggcgacgccgatccggatacagacgccaatgtgatgcaattccgcgtcacaaaaccgctgaagggagcagacacaagccggaagcctaaatatctttcaacaatgcctaatgtgacatcaaagagaatacacaatatcaggacgcttaaactcacaaatacgcaagacaaatacggccggcccgttttgacgctgaataacaagcgatggcatgatcctgtgacagaagcgccgaagctcggcacaacggaaatctggtcgattatcaatccgatggggggaacacatccgatacacctgcaccttgtttccttccaaatccttgaccggcgcccttttgacttagagcgttataacaaattcggcgacattgtgtatacaggccccgccgtcccgcctcctccaagtgagaaaggctggaaagataccgtgcaggcgcactcgggagaggtcatcagaatcgcggcgaccttcgctccttacagcggacgctacgtatggcactgtcatattttagaacatgaagattacgacatgatgagaccgatggacgtcacggataagcagtaaacaaatatcaccccttttagagaaggggattttttatttatccaaaaagaaaaaataagaagacacttatttgcatatactgtaataacaggaagacgatgcaccctcattggaaatctggataaaaaaaggaattaggagattagggaaaagtatgagacaatgaaggagtgcacgaaaattcataagggaagaagtgactttatgtcttactacaacaaacgtaatcaggaaccgctgcctaaagaagatgtcagtacgtgggaatgcacaaaagaggactgtatcggctggagcagaaagaattttgccggcagtgataccccgacttgccccctttgcggcagtaaaatgatcgacggcgtccgttcgttggtaaatctccaaaacaataatcaaacggcatcaagttagacctcccttttacgagtctcaacatagagaaggcctccatgtctcatgagaggcctttgcgttatcatttccttttatgatgcaaaggagcaatgaacatgaaaaacgatcggcagcagaaagatctgaaggaaatggcaaaacggcggaaaatgaaccttgccgcacagtcattcatcgaaacgcttcattttgccgttccgattctccgttttttcaaatggctcgcctcagccgcagccagctttgttcattaaaaaacacccagcgggcgctgagtgtttttttcatgattggatgacggaaaaactgttgataatgccgttgtcattttcccagactttttcgcattttttcgtatccaaatgataagcataaatggtccggaccttcgcattccgccccgtttcatccttcagacgcttagcgccttttgcttccgccatgaaataaatgatgctgccgtctttagaaaactgaggctgggcatcaatcagcggagcgaagtccttcccgtttgagataatcgtttcatcttttttcgttttgacattcatcagacggatggacgctttttgttccgtccctttttgggtataagatgtaaagacaaagttctttccgtccggtgacaccgccacgtcgctgataaactgttcaaggtttgtcagatcctgaaggtgttcgcccgctcctgctgcaaaccggatattcgtcggttcagggtcaatccccttctcatttgcctcatccgttttttgataatcctcttttacagaataatgcagaagcgcaaaatcgttttggctgcggttataaaagaagctgctcacactgtcgtctttctcatcggcggcgggatacagattttcataacgtttcgttttcaaatcaaaagatgcgagacggaaaatatcttcatccgcttttccgagacggaaataaatgtgcgtcagatcctttgataaaaacagactgtcagcgcttgccgttcctttataaagcaccgtcttctgtttcgtcttcagatcaagcttatagagacgcatctcattttggtcattattcccgacaaaatagagcacctgatgggcgtcatccagcgcaaacgccggatatgccgaaagcttttcctcgtacagcacgcggccgtcctcgtaatatttcgtcatcagatctttgtctgtaatggaaacaagcagcttgtcatggccgccggagacaacggctttcccgccgccgtcgctttttcctttaatcagtaaaacggacgcgatgaccgccgccgccaaaacggcagccagcaacatccagatccatcgtttcttcttcattatcaatctctccgtcaatcagaaaaagcaagaatcagtgtccttgctttttaagatggtctattttaatagctgtagtgtccggatactcttcctttgcttaatggatatccgagcgctttgaacgctttcgggctgacatccaatacggcattcggcagacggcctacatcatttttgtatacggtgataacctttttcggttttgctttcgcataagctctgattttcgttccgtttctcggaacgtcaaatcctaattttgtcgcacaatcccagtgtcccagttttttaccggaagatccttttttaccgactccattataccatgtaatatttccgttcacttttttagcacttgcatcagaagagtaactgatcgctcccagcgtgcttcctgctaaaatcaataaggctaagaataacttcttcaagctttcgtcctcctgattctttattctaggcaaaattatacaccaagaagacgattataatatttcaatcactttacatgttcattacaacgtgatgagacatgcacataacgacggcacaatttcccgttctatataattccatggtaaattatactacaaaatttaattcattagcgttataatattcatagagtatttctgcattcaatatggactttttataaggcctattgatagttgcataatatgatatattttgagaaatcaggctttaggaagcaggcactttattccttttaaccgtggttcatattgatcatgtacctatactcgtttcaatcagactaggagtgataatcaatgaaagcggcaagatggcacaatcaaaaagacattcgaatcgaaaacattgatgaacctaaagcagaaccgggtaaagtcaaaattaaagtcaaatggtgcgggatttgcggaagcgaccttcatgaatatttgggaggcccgatctttattccggtcggcaaacctcatccgttaacaaacgaaatggcgcccgtcacgatgggtcacgaattctcaggagaagtcgttgaagtgggcgaaggcgtcaaaaattacagcgtcggcgaccgtgtcgtcgtggaaccgatttttgccacacacggacatcagggagcctataaccttgatgaacaaatgggattcttaggcttagctggaggcggcggcggattttctgaatatgtatccgttgacgaagaattgctgtttaagcttcctgaagagctttcttacgaacagggcgcgcttgttgagccgtcagcggtagcgctttacgccgtccgccaaagcaaattaaaagcgggcgacaaggcggcggtttttggctgcggaccgatcgggctgcttgtgattgaagccctgaaagcggccggcgccacagatatttacgcggttgaactttcaccggaacgtcaggaaaaagcgaaagaactcggcgctatcatcattgatccgtcaaaaacggacgatgtcgttgaagaaatcgctaaacgcacaaacggcggcgttgatgtttcttatgaagtaacaggcgttcctgtcgttctccgccaggcgatccagtcaacaaacattgccggtgaaacggttatcgtcagcatctgggaaaaaggagcggaaattcatccgaacgatatcgtcatcaaagaacggaccgtaaaaggcattatcggataccgcgacatcttcccttccgttcttgcattgatgaaagagggctacttctcagcagataagctcgtcacgaaaaaaatcgtgctcgacgatctgattgaagaaggcttcggcgctttaatcaaagagaaaaaccaagtgaaaatcttagtcaaaccgaactaaaccgttcagctgaatatcagacacatccgaaaaagagccgttccggctctttttttcatctcatcgtctttccttccttttccttttaaaaatgatcccctctgcgcaaactattttttaccctgtcccgtctatccttaggcaacagcctatgatacgtattttaaaaaaaggagccctttgaagcaatgaagaacgaaacagccaaagcgtcgcttgtgacgtgcataactgagcgcaaggaagacttttaccggctggcgtacagttacgtaaagaacaaggatgacgcgttagatattgttcaagaatcaattcaaaaagcgctgacatcggtcgaatccgtcaaaaaccccgatgtgatcaaaagctggttttataaaattttagtgcgcacggccattgattttctccgcaaacagaaaaaactgaaagtgatggatgatgaaacgatcgagtttttaagccgaggaaaggaagatcactacaaggacacagaccttcacgaagcgcttgatgacctgccgcatcaatataaaaccattatcattctgcgtttctttgaagacctgaaattagaagaaatcgcggacatcacgggggaaaacatcaacaccgtcaaaacacgcctttacagggggctgaagctcatgcgcattcagctgacgaaggaggatctttcttaatggaaaagagattagaacaattaagagaagagtataaaagtgtgcccattcctaaggaactggacagcattgtcgaaaaagcccttcagcagaaaccgaagaaaaaacgaatcgtgatgtggccgacatccgcggcagtcgctgcggccgtcttatttaccgccgttgtcaatatcaacccggatgccgcacaagccatgtctaaaatccccgtcatcggcaaagtcgtccaagccatcacattcacggagatgaaggaagaaaagaaccaatcaagcattgatgtgaaaacgcccgctctgtccggcctttccgatcataaactcgaagacagcatcaaccggcattatatgaaagaaagcaaagagctgtatcaggaatttatgaaggcgacctcaaaaagcaaaaaaggccacctcagtatttacagcgattatgaaaccgttactgacacagcggatttgatctcaatccgccgtgatatcgaaaaaacgcaagcttcctcttatacgcaaagccgttacatcacgattgataaaaagaatgaggccgtgcttacgttaaagagcttatttaaagatgaccgttatattaaagtcatcagcgaaaatattaaagaacaaatgaaaaaacagatgaaagaagatccgaataaaatatactgggtcgaagataatgatatgtcggagccttttaaagccatccgcgccgaccagaatttttatattacagataagcacaaacttgtcatctcatttgatgaatacgaagcggcacccggatatatgggcgttacagagtttacaataccgacctccgtcatctccaagctgcttgtcggagaccgctacatcagataaagaaagaaaaaaatccatgatatccgcagatcatggattttttctttcgtcccgcaacagccaagatgcacaagggacccttttcatatatcagacgccggacgggggctgaaaagtttaagaaaatcacagcatttcattcattttttctgaaacaaaatccccttccgaatgcgtctaattaacggaacaaatggaagactgtacagaaatctgccatagccatccgcaaaacagcgagaatttccgcacacattattggaggaataccatgtcagacaagtcactgcatcaccgctatattcccggactggatggacttcgcgcctttgccgtcctcgcagttatcgcatatcatctgaattttaactgggccgacggcggtttcattggtgttgatatcttttttgttttatcggggtatttaattacatctattatattgcctgcccaaggcaatgccatcacccttgatttgcgtgatttttgggtgcgccggatcaggcggcttctgccggcggcttatctcatgattatcacgacggtcatttgggtcgtattgtttaacagcgagctcctgcataccgtacgcggggatgcggtctcctcacttttttacataagcaattggtggtttatctttcatcagctttcttatttcgacagcttcggctccccttcgccattaaaaaacctttggtcgctggcgattgaagaacagttttatatcatatggcccttcctgctgcttgcgggaatgtacatatgtaaaacacgggcccggcttgcggccgcggtcatgttcctcgcgttatgttcggcagtcgtaatgagtatgatgtatgtgcccggcggagatccgagccgcgtttattacgggacggatacccgctcatttgaattgctgatcggctgcgctttagctttagtgtggccgatgaaacgattatcttccaaacggctgccgagcagcatgaaacacctgcttcacgggacggagcttgccgcttttgccgcgctgctgctttgcgtcttttacacggatgaatatgaacccttcctgtacaagggcggcatgcttttgatcagcatcaccgcagcggttcttgtcgcatgtttatgccatccgagcagctttttgggacatgttctttcatggaagccgcttcgctggatcggaacgagatcatacggaatctatctttggcattacccggttttcgtactgagcacacccgtgcaggaaatcggaaatccggtttattggcactgcgccgtcagaatcggcgccactttcattcttgccgagctgtcttaccatttcattgaacagccgatccgcactgcgggcttccggccatttttacgccgcgtgtttctgaaccgctttttggaatggaagacgtcctctgtcatcagcagaatgtcgctcggcctcattcttgccgccattctcgtatttgcgggcgggctgtcaggaatagccgaagagaaaaaacagccgcaatggacgtacgcgcaaaatgatcagcaagaaaccgccgcctcttcgcacaagacggccgatcacgatcaaccggcaaaagaagatgacagcaagaaaaaacacggcggcgaaaaaacggataccgcgtcagacaaaaacaagaaagaaccaacagacaaatcaaatacaaagaaaaacgaagagaaaaaggaacagtcatctcaaaaaacggctgatccaaaacaaacacagcctcagcaagacgtgctggccatcggtgactcggtgatgctggacattgcgtcatacctgcggcagtccctccctcatgtcaccatcgacggaaaggtaggaagacaagtctctcaagcactccagctcacttcggaatatgcgtcatttaatcagccggacaaagcggtcatcatcgagttagggacgaacggctatttcacaaacagccaaattgaatcactgatcagctccttttcaaaagccgatatctatcttgtcaacacacgtgtgccgcggcagtgggaaagcaaagtaaacgaatcattgcgccggcaggccgagtcacggaaaaatgtgacgcttgtcgattggcacgcaaaagcattgcagcaccctgaatacttcacaccggacggcgtccatctcatacctgaggggtctaaagcgctgacatccctcatcgttcaaacaatgaaatcatgacaaaaaaaagaggccccaaaaaggcctctttttcgtatatcgtcaggcaagcttctgtccgcaattcgggcaaaaattcgcgccttccgttttcgttccgcagttcggacaaaatttcggcttagccgctccttccgagccgttcgccggtgccgtcccctgattctgctgactttgattttgctgcggctggttctgctgattttggttcatttggttcatcatttgatttgccgcattcattcccatcatcatgcccgccatgtctgaggcggcgccgcttccgctcattttgccggatgacattccgtccgtcatggaaatctgctgatagcggttcacatcgcccaccatgccgtaagaagcgtttttcgtaatcatatcctgaacttcctgcggataattaaagctcataatattgaagcccgtaatcgacatgccgtctccgatcagctgcatatcaagatcttcttgaatcccttttccgatttcaaaggaattcgactgcagattgaacatgtcttttccttctctggtgatccatttcatcaaaagctgatcgagaatagacgtaatccggattttaatgtcctccactaaatagctgtctttgacacccgcaaccttatcaatcaatccgatgtagtcaatgaccttgaagttaaatgtgccgtttgcgcggatcggcataccgcccggcatacctgccgccggaatgttgatagcgttttttgtgccccacttcacggtgaactccttcgtattcacaaacagcacttcagcccgcatgccgctgttaaagccaaacttaaacccttttagtgtagatagaaacggaatgatttctgattcgatatcataatcgccgtcatcacggaaaatcccttcaatcttcccgttgtataaaaagatggcatcctgtcccggccggatgatcagacggctgccttttttaatttcacggttgttccatttatagaaaaccatgtcatctctgaattcttcccattccaccacatttgctaactgatttctgaaaaaacccatgtatgctcaaatcctttacatataatttaaaaacttcccttgcttccgctgtaactcgtgccgcccctcgtgactccgccgtcattgtcattatctttatcaggctttttttctcttgtaacgtcggttcggatatatgtgtcgtgctggctcagcacttcagacgtatcgtgattcatatacgtgctgccggtgacggtgaccttgccgccggaattgtacaccatcacggtgacggcgattccggccgcggctgcggcaataatgagctgaaaccaccatgtgagcagcagattgtcagacttgtcgtccgggcttttccccatatctttataagccatcttgatgtaggtctgaaacgccttttcataatggcctgcggaaatatctgacgagatcgtatttctgatcgtattcagccggctgttattcaaatacgtctccgcctttttatatccggagataaatacttcccgatttttcatatcaatggtcaaaatcgccgtgcttccgctaaaatgactgtcataaaaatcaccggcgtactgctcgatgtccttaccgcccgttccgtttgcggtaagaatgataaaatcggtatggcgctttgccccgagcttcccggccaattcctcaagtttcttcgtttcatccttcgttaataaatgagcattgtcataaacatattgcttctgttccgcggcagacgccgatgtatgtaaagaaaaagacatcatcagaaaaaggacgaaacagaagagacacgctttttttatcgatactttcatcaaaaaccgcctcctatcataagtgagacgagtcttaatgctaaaaacgcaccggcggttatgccgccgaaccacgcggccacttttccggcactgatcggcggtttgccgacaaccttgcccgtctgcccgttcatcgcaaaaatgtgctcagcccgctcatagtcgtagctgaccatccagaccggaagcagtacgtaaaagctgctgattttatcggtctgaatctgctcatccgtaatgtcagccgtcgtatatccggagaaggtggatctgatataagaatcaatataatggctgattttatccttcgcccgcggaaagagatcgtcatcggtataattgtacttttccgcaatatatcccgctaaataggccgtattaaactccttcagctcactgtatgagtaaggctccaatttgtccattaattcatcattcattttttctgaagcgtcgaccggaattttgagataatcaagattgatatcgcggtacgcgttgtaatattcggtctccgtcacccggtattctccatcttcatagtgatgcactctcgtacaaacggcattgacctgaaccttgctgtttaaatcaaacatccaaaacggcacgtacatgcccgttatgctcttcacccgatcggcagacataaatcctttcggtgtcagccggccgtttcggcaccactttttaaaagcgctcatggcttcttctttactgatcgtaaaaggaatcaccatcgaaggcgcgagatttcccgataatcggtcggcgagaacggcggctcctccgcaaaacccgcacgtcgtggccgtcgtttccgcctcagtcattaataccgcaccgcaattctcacagcggtactcgttcgcctcattttctgaaaatctcgtcgttatatactcttttggcaggctctcaatctgatcctgccgcccgcagctatgacatgtcagcatgccggatgaactgtcaaagaccatatcatcgccgcagttcgggcatttataagaaatgatcattctgtttctctcactttctctttatatcggacaaagctgcagcccgctgtctattgatctttactgaaaagcattttctgcttaagcgccgccaattcatcatcgacactgctttgattgctgtcatatttagccgtcagatcgtcaatatcgtctttcggagacgcgttcagctcagccatcgcattggcatgatcaagcgcttggttgaccttgtcttccattctgccgaaagctgtcatcgattggcccgcatttgacacagaggaccccaatttgttcattctctcctgcgtttttgccacagaccacttcgctttgatggcatttcggcgcgactcaagctctccgatatcagcgacaagcttgtcatgcattttgcgcatttgagaggcgttggaagaagcgagctgataagccgtctgcagctcggtcagtcttgattcaacagccgctttcctttccaaaaatgtccgcgcatcagcttcattgccggcctgcaatgctttcatcgcataattttccatcttttcggcatcagcctggcattctgttaacgctcttttcgcccgctgttcctcagccatgacagaagccgtctccgctttcacttttcctaaatcactgttcagattccgcaaatattgatcaaccattttttcagggttttcagctttatccagcatcgcattgatattgcttgacatgatgtctttaaatcttcctaaaatactcatttttcattttcctcccaaaattaaatagtaacaagttcacagttatctatactgtttttttcaaaaaaagtttcattttctctttaatttatgtatttttatatgaaaatagtctcattcagcccatttgtgccggcggtaattctttatgaccagatacagtgagaacaaaaaataaacaaacagcccgatcatcaacccgctcactaacggataatgtttcgcagcatacacaaagaaatcaagctgcgaaatctgttccggacttgtaatcgtatccgtcccattcaaaagctttgaaaatttcgccgtatcattccaatcaaacgaatcagaaacaagctcactcccctgataccaattgacagcggcgagacataaaaaacaaaaaacagaaaacgcgcattgcacaataagaaaaacatgtttcatgaaaaacattcctccgcggttcaatatcataggccgtcacactgtacatgacggcagcagcagaaacttggttttactcagaactgataaaaacgtgattgtatgtacttcacatcggttcaatttactggatgcctttctaaagtataccgtatatcgaaaagggtttcagacctaaataaagaggatgcttcccgaagtccgatgactttcaagaagcatcctcgatattttacagagtcactccaacctcttttaagctcggcaaagcatcaatcgcaccgattttagtgcacacgagcgcccccaccttattggcaaatgagacaatatcacgcagcttcgcaaaatcttcggctgccgtctgaatctcatccgtgcgcgccagctgatacagcgccgcgccgacaaacgcatctcccgctcccgttgagtctattgatgtcaccggaatgctcggaatgatgtcaatatccttcccatttgaaagaagggtaccgcttttcccgagtgtcaccgcaacaatgccggccccgagctcatgaagaaccgcaacaccttctttatgatccttcgcaccgctgatgatctcaagctcttcgtcactgactttcacaaaatcacttacggcaacggctttttttgcggtgtttataaactctgaaactcttcctttccataaatcctcacggtagttaggatcgaaggaaataaactgtccattgtctttcgcaatcgacatcagccgtaaataggctgagcaaaacggatcagataacaatgccgtcgctgacccgaaatgaaggattttggcatcgtttaccttttccagatcaatatcatccagcgtaaacaaagcgtccgctcctctgttaaacacaaagtcgcgctccccattttgttttaatgaaacaaacgcaagcgttgtaggcgctttctcatccatgacgagcatagaggtatcgacatgtgcggcgtccaatgtctgcttcagaaaatacccgaacggatctttgcctgtttttccgctgaaagccgcgtctccgcccagcttagcaatggctgccgacacattcgccggtgcgccaccggcactttttaagaaattacgcccttccgtcaaatcaacatccacatcggtacaaaagaaatcaattaacaattctccaatacaaataacagattggcttcccacattatcacactcatttatcaattctcgattatagtttcagtatagtgctttctgtcataaatacaaccgtttacatagaatattttaaattttacgtatacttatctggcagccctttgttccagatcagacatcatctgctgatattttttttcagttaaaggataaaaagaaataagaataatagacagcagaatgaacaatcccgggatgagcgcattcatatttttaatcgcattcaatgacgaggccgtctgatcggtattcgcggcatatccggcgattccgagataaacggccgaaaatgacccggctaacgcaactccgagcttattgatgaaactcatgctcgaaatcaccacgccatcagcccggactccggttttccattccgcataatcgacacaatcggcaaccattccccaagcaagcgtatttaaaggcgtcgtaaaaaatcccgaaacgaaaagccaaaagaaaataagcggcagcgaagaatacgatgtaaactgaaggcccgcataagaaatcagcgatagcgccgccgtgatgatcataacctgcttccggccccgcttctcagaaaagaaaggaataaacagattgctgatcagcgctgcgccgaaaaacaacacggttcctaaaaatacaaattccttatggctgacgttatacgtaaaatagtacaccatcgtgctgagcttaatgttaaacccaatcgcaaacgccaaaaatgcagaaaccaaaatgagcaaaggcttgtttcggaacaaaacggacaacgtttttttcattccttgtttttttcttttttcaggctgaatccgttcccgcacagtaaagaaactgaacagattcaacgcgatgctcaccgccgcatagataagcgccgtcatctgaaatccgaacgcctgatctttcccgccgatggcgtccgcaagcggtgtcgcacaggaaatcgataacagaattccgatataaaccaaaatcatccgggtcgtcgtcagaaccgtccgttcctccacggaattcgtcatccgacccgttaagctgttgaccggaatcgtctgcatgctgaaggacatcccaagcagaatataagtgatgtacgcataaaccatgttccccgtctcgccgaaatgaggggtcgtaaagcataaaaacgtaaatagcgcaaaaggaaacgccacccacaaaagatacggccttgcctttccccactttgtattcgtcttgtctagaatcacgcccataatcgggtcaaaaatagcgtccagcacccttacgataagaaacaaagctgcgatgaccgcaggcttaatgccgccgacgtctgtatagtagaataataagtatgcgtttacaaactgaaagataatattgtacgacatatcgccgaatccgtagccgatccgttccatccaggacaggccgcgatgtttcgtctttactgccgctgctttttctgtttcaatcatcatttcccaccccaagaatccgttttcatttttgataagcaagagggagaatgcaaagatcctccccgttcactcagcgatttggatacaccatcacttttaagcattcatttttgtattgaaaggcccgttccatcgcctcttgcgtctgctccagcggatattggtccgttacaagatgcttcgtgtccacaatgccggaagcgagaaattcaattcccttcggatacgtattcgcataacggaagattccgtatatatcaatctcgttatctgcaataaacggcacattgagcgggatctcgttctgagaaggcaaaccgacaatcgccagttttccgccccggcgcacggaagccagtgcggattgcaatgccgccggattccccgctgtttcccaggcagcatcaacgcctctgccattcgtgatcgttttgatttcttcaccggcatcctgttcccggacattgatgacatgcgtcgcgcccatttttttcgcggcatctaaccgcagcggctccaagtcggtcacaatgattgtgcctgccccgtatgctttcgcggccgcaacggccatcagccccacagggcccattcccatgatcgcaaccgtagaaccgggctggagcttcgttctcgcggccgcatgaatgccgacagaaaacggttcaatcaaagccgcatcttcataggatagtgaatccggaattgaaaaaacaaagtcctgacgcattttaatatattggacaaacgcgccgtcaaccggcggtgtcgctaaaaactgtacatccggacaaagattataacgcccttccttgcacgcctcacagcgtccgcacgtgacaccgggttcgacagcgacccggtctcctattttaaattgatcgactgacgatccgacggcggctatttctcccgcgcattcatgaccgaggataaatggtttttccactacataattgcctattctgccatttgtatagtaatgcagatcagatccgcaaattccgacagccatcaccttaatcaacacttcatcatgattgatgtcaggcacgggcaatgtttcgattttgatttctctcgtgttgtgcataaccgccgctttcatattttgaggcactgtgtgagtcatttggcaaaatcctttctctgctttgaaatgtaagtgcatacatttttgttttctctattactgcccctattttatctgcttttccatacgtacaacagcctttcctgctgtataaaaggacagccgcactgtactttttattttttcatatacaaaaaacactgaattgataaaatagtactaataggaggtgcaggctaatggctgaacttgaaaaccggacacattttgcagaactgctggcacctgccgtcaaatcgctgaaacttcatcctgattataaagtcagaaggaaaaagaacgaaaaaacaggacagtcttatatagatcaaatcgcactccgattaggcgtttcctctaacacgatcaaaagctggatcggacagatgggcggaaactacattcccggacgaattgacgacggaaagctgttcggcatgatctggatcattatagaaaagactgatatggattctgaatggctgaccgatcttctggaaaccaccaccatacccgtcatcaaacccgcattgcccgtttggacggcgtcttgtctaaaaaaagcaaaaatactccggaaagacggatcattcggagcgccgagtgatgaagatgttgaaaaagcagtaaagcggctgtttcatgacagacccggccacgaaacgaatgcgcttacaagaaagtccgtcacgcataacttaccgtcacgccggacggggaactttatcggccgctgctttgatatagaggcgattcgacaatggatgctgtctccgtcaccggtctgtttaatcacaggctgggccggcatgggaaaaacaacgctcgctcttgaagcagcctacctttgtgccggcggttcaccagattggccggcattcaacagcatcatctggatcagcgcggactggaaaggattgagcttcagcgattttttaaacacgatcgcctatcagctcggacgcaccgaacaaatcgataaatcaatcaacgaaaaacggttcgtcgtccgcaatgcattagccgctcattcaaatgaaaaaccagtattgctgatcgttgacagcattgatacagcggaacgtcacattcacgaatttatcatcggccttccgcaaggcgtaaaggtcctccttacggcacggaaaaacgtaaaacaaacataccgggacggcctcggagaactggcggccatccagctgagcggccttgaacaaacggatgcccttgatttttttcatcaagaagtgcaccgctgtttgcaaacatgcaacctcccgcaaaaacgggaaaagctggagcagctgctgcggctatcgcctgcccttaagaatgaattcatctcggcagccgccggcaacccgaaggccatggcactcagcgtcgcttacatgtcagacgacgatatccccgctccccagctcatacaagaacttaaacaagcgggctactcattattggaattgtttgaggttctctttggccgcacatgggacagatgtcatgaagacacacgaaaactatggcagacgctttgctttttcgctaagccccctgatgagaaaagcttggctcaagcagccggattagacgtccggcggtttcattacgcgattgagcaaatgcggtcatatgctttaatacagccggaacgaggcgaaggaagaattcaatacgcagcccatcaaaccgttgtcgcttacggagaacagcacttatccgaaaatcacgaatttgcaaaagaagcccgcagccgctgggcgcattattatattgattatgcggaaacccatttaaaacgggaacggcccaattctgtctattggagctatctgttgggacggaatttagagcaaatgaaaaaggaatggccgaacatcctaaaggtcatcgaatggtcgggcgaaaccggacaacatgacatcctgattaaactcatcatccgcatcagccattttctaagcagaatcaacctgcccctgcgaatcgaatacggattaaaagccgccgatgccgcccgtcaatcaggcgaacacacgcgggaagcttactttcggatcgacacggcaggctgggcgctgatggaagtcaacgattcagacggagctctcaggcaaatagaagccggcctgaagatactcgaacaatcaggcgcgccggatcacgacgacttgaaagtatggggaaccgccctgcaatcgaggctgctgttaaaaatcggagaatcggacaaagcggcagcaatgctggacggcatcaaagatcagcccgtctcgcccattatccggcacagggttcttctggtccgcggcgacctgagtttcgcccgctctcactacgaagaagccatcacattatacgaagcggcaaacaaaaccagcgccgcatacggcggcgaaaaaacgatagaagcctatttcaacctcggcatggcttacgtcaagtgtgatcaactcgaaaaagcggaaaaagcctttgaacaaatgctctatgacaaacacaacgccaatcaagttgaactgatttactatcattacggaatggcacagctgttgtatcgaaaaggagaaactacgaaagcgatagaagctaatcaaaaggcgattcgtctgattgattcgtgggagcctgggattgggattcggggtggggttgagagattggaaaaggtgattaaagaaaacaactagtacgcatagtagttctgtcatcaatctcactcaatttcttcattataaataggaaaggccaattgaagtcgcagttggcctttcgtttcttattaaggtctacaaatgtattgaatcaggttttcccgtatgtattctttctcgtataaaggaaagcgtatcatttgccagctttttgcgacaaagaacaataccggaatggccacaattgtagacaaatcttgtaggtttcccccaactttcccataaataatctgcatcttttaagtcaatatattgatcgtgttttgcagaaatcagcagaatgttatctttattaactttaggcaaggcttgactaggatttgtgatattccaatattttattaaatcttcataggtcacaccatcttgttctaattcttctcttatgtatttacctgggatcgtgttccatatcgaataagaaaggcgattggcataaaagattgataccactacatcaatttgagattctagggtagctattagattagtgacccatccccctaggctgactccaactatgataacaggcccttttttatttgcttttatccagtgaattaacgcccgtaaatctacaatagcctgtcttgtcgactcaattgtacgatcaatgtttgcactgatcatcaactcgccactatacagtgaattttccggttctctttcaaaatggtatggaagagaataataatacatattccagcctaaatccttcattatacggttatgaaagatttttttaattctatcgtacgaatccatgcgccagccgtgtacaaagataacattgggttgatctatatcattttcatttaaataaacctccccttttaaagtatcattaacaggattcccagattgaattaaggattcatagctaaatgttccaaccctataactttttttagattcattcaaattgaatgaaacatcagctgtatttgcactgtaaaattcctctctatcatcaatatcggctgtaatagcagcagaaaaatgtttatctttgcttctttttctgtgtaaatcatataaagcaaagcgatctatcatttttgataaatgcactattaagtcctccttgattatcataaaaaataatatcagagttgataattgggttgtctgtctccatagagttgggacatagacattttaacaggatttctatttgacagtgctttcctaggggaaaccgtctaagagggttggtggcactatttatttagataactgggtctttttcttttcggtaacaaaatctgtttcggttatcggcagaataaagagaatctctccctggtttgcgatcatgaaattgcatatgaagattctaatggagctttgagtgatatatgtgattcatttaccgagttggttaataagctctacgaggaatgaatggatatagaaaatgaccaaacataaataactcaattgccccttccctttgtggataagggcaaataaagcatgtgctgaaaaaatcaaaccataaaagacctctattttgaaagaatctcctgatttcttttttacaaatttattcggaaacttttattccaatgtccttgctacagaagtaatgcccgaagagaaattgcctgaccgcgcatacattatcgacgtgatgtaaaacagagaataaacctcaaaaattagggagaacatccaacaacatgctctccctttttttcgcgaaaaattattctgctgtcactttatacaccttactgagaggtccagtgaagagttccttcgcggatgtccccgcaaatgtctcaatagcattctgtacatgtggaagcattaggtctaggtaacgaagttcgctgcccttcttatcagcaactacctggacggaaccaaacatatcaggatggtccttcagatatgtgacgtatcccttcagctttgcaacgctgtcgccaagccaatcgccgtgtgggtcaacaatcgcaggaacaatactaccgtcgttcaacttctggaagaagatgaaatcaggatacatgttctcccatacgctgttcagcatgtatgggatcaccagcgaagcattcaagtttcttgactggttcctgtaccatgcaacattcagcgagcgagaaagctctgttcgaacgaccttcttctccaaatcattcagattcatatatgcccagccatcctcatcactgataatgtgcttcggataagcatcataatccttgttctgacgagtaatgctggcctggatgttgagattacgttcgatataaggcttcgtgttaccttcgatgcgctcccacttctccttattctcttcagacactgcataacgctgcggactataaatgtccagcagctccttggtcttgttctcagcccaaacttccagtgcctgaataatctcaatacaggcaccaactgctgaaatacggctgatcgcctcaacatcactgtcgaattcatcgttcttacgtctattgatgaaatacttcaccaaatcagaagcgccagcaaacacactgactgcacgccgatagtacgatacaagcctgtcagcatcattctgaaccagctcttcgcggtcttcgaattcctctcccgtcaacgggtcaatacgcttcacactcactatcgtattgctaatatccgtgtatgcgcgcttataatctccaggatgacgcctaatctcgccctcgacgttgttatagaaatcctcatctatctggcttgctgtatcataatcaatatcaatatcagatgtaatcacgtcaacgcaatcccacaggtcgaggaaatgattcggcttatcatgtcgtaccctacgcgtaataattccctcaaaacttgtcttaatatcttcactgttaacctttggaattcgttccagcgcagctgtcagctcctcctcagtctcagtaacaccttcaatatctgcaacatagaatccttcgtcctctgtattcacaacgaattctgttccaacgacagcttcctgtactgactggtgtgtcgcaggagctccatgtatggtcactggaggagtatctgcaggcaatgcctgcgttggtgccgcagtaccagttgatggctgctgatgcttcttctccagcttctgttcaatctttttcttcgcattatcgaagaaacttacatcagctggattcttcaaaatagttgtagtcgcgacagccacgttgtcttctttcagcttctgaactacgccttcgactgtcactgcgtcatactcaggaaggtagcaggcaacagtattcaattcttcaactaaatcaattcttcttgcaagcggcgtacgaatcatacgaccaatcatctgagcaatatatgtcggatctgtacgcttacgacgagaataaataacctcagcacgcggacagtcccaacctgttgatacagcatccttagcaaacaggattcgaatctctgtccgctctgctacatcttcaggactcacatagggaattttgcctgcaggtgtaacaatatcttcatgttcaccaaatacgttggcaaagcaatcggaaatgtccagccacggtaaaaccttttgtatatgtgcacacaatgaagtcagggtatcttttgtaaccttgtcttctacctgtacaaccatcaacggcgtcacgactgggagaataccgtgatccgtacaataatccttccaagccttagaagacgctgccaacttaacgcatgcctgcgttaaatcctgatgtttcgtatccgcagatttcttaggtgtgcgcagttcaatcgtatccttaatcagcccagagttacgaacggacgatacagacacatcaacagacgcctttatatcacgattcttacgtccttgcatagcagcattaaatcgctcaggggtagccgagataccgacaacgcaaggcattgacggatttactccgtcctgaccatcaattaatttggcataaatcgttttattcgtggattcctttatagcatccttgccaagtccgcgatgagcctcgtcaatgaaaagatacaaatgaatgtctggatcgctaatcgtgtctgtcagaacatcataaaatgttcttcctccttcaggagggttagccagtttaccctttgcagacaaaagctgtctgttcaggaaataaatacggcccggcatcagcttgatatggctcttcacaaaatctggcccgattgcttccatcacagtagctcccgtaagcaaatcagaagctgcttcaaatcgcttcatcgtctgttcgttcaagctcgggctatcagacaaccacaaaatcactgcatggtcatctccagcatatgtatcattgctataaaacaaaccttctgctactgctgcagcgataactgtcttaccagcacctgtcggtgccgtaagagatactgctgagacagagccatctgaagcatagcttcgctgcatagaatccattttctttagaatgtcattgactgcagacttttgaaaatcaaataattcgtatttcatcaatcaagtcctccttcgccactaatttcaaacgtccttaaataagtctcatacaatctatggacgttgacacctggaagacgtttgcacatattagaatatcttctttggtcgtcagtcacgacgaatactgtcttaatagacggagtcttcttgaccttatcgcagaacttacttgcctgattgtaatcaaacaggacgccatagaaatcagtcgtcagataactctttccgatgcgtttaataatcgggcctctgcagcctgcctgcgtccaaagaagcggcgcaatcgcgtcaaaagcttggtcaagacgaatcggccatgctgactcgtatgtaagctcacagaaaatagcatttgcattaaatccatctgctttaggcaattcgtatcccaaatcaatgtcttttgctggctttccataatctccatctagtagatttccttccacatcatacccttcaatcgaacattttgtacgaggccatgtgacgtaatgcgcaatgccatgctcttcccattttttatcaccttggcgaagtccttggtcaataaactttttttcttctaccgcggatacttcattattagtcacacaaacacaacgcctatgaccgccatcgagtgcattcaaaatattcactgcatgaagtgttgtccctgaaccagcgaaaaaatcaagaattaacgcatcaggtttttgtgcaacaaaatactttaatgtatccaccacggcataaagagattttggaaaactaaatttcccgtctccgataattgatttcaacaatgaagtcccataggcaccagcgtcataaactttgttttgccatactgtagtagcacgagtaattttcccgccagtttctacgatgatcttacttccatcttcacgttctcctcgaatttcccaacggccttccttaaactttttagcatattttgtacttacatacttgaaaatataaggttgtaaaggatagccctttgacacctgaacaaatcccttatcaaccaaatcctgaagagtttccttagtgactccccagttcatttctacgccatcttctctgataggaaatactgccgttgctccttcaattacaggagcatcttcaattttttgttcaggcgtaagataatcgccaatagctacaatgcgcatagatgtatcatcaacataaatcggataaaattgagcagttccacccttaacagtgcctcgtcttgacgcataatccgttcttcttaaataaaaccatctgatttctttttccttaccatcacccataggatgagttacatgcgctttaccaaacaacagaacataaacatattcgtcagcacgagaaaataaattatcgcgtttagcaccggaaggactaattgtaacgcttaccatttgcatctgtgcttcaggaaatgtttgctccaaaagtaggccgagacgtgcatattctttctcatcaatcgttacaatgagaacgctgtcttcaggatttagcagctgtttagcaagtttcaaacgacgttccataaatgcaagccactttgaatgcctatattgatcggagccatcaacataattattattatatttccagtcttttgcgcctgtgttatacggagggtcgatgtaaatacaatcgaccttaccaggataagcatacgacaaagcctcaagtgcatgataattctctgaattgatgaccatatgatatgggtcatctggatttccacgctctacacggtcaatttccttgagtcctggataaatgacgtcacgataactcacaagaactaccacgtcttggacagcaacagattttatctcaccatcgtgctctagtctcgctgatccgtcttgaatctcctttactacccatggaatcgaattctcatctgtttccttcgagcctctctcaggaagaatattgacagtatccccaacggcaggcttctttttataaagacgaagagcctcaggcaaattatgctcaaacacaagcccgtaagaatggttcttaacgtacttctgaatctgtcgtgcaagctcaggattcagctttgcaacttcagaaatggtctcattgatattcgccatttatacgccctccttttcattatgttcttcaatccatccgtgaataatggcagcaatcgtcgtacctttctcagcagccatcattttcaaggctttcttatcagacactgtcagcgaaagcgacagtgtcgttctcggttcatttgcagcagaaacagactgaacaacggtttgctcaatctgtttctgctccgcttcacgtttcgccatgcaaattatctcctgacattttatgtaatcacacatttaattaattatacatttattcattcgataagtccagcgcttcgcgcactgtattcaccatctcaagcgttgcttccgcgacttttccctttggagcaaattcattgaagcgggagtaggagtaaaggagattcagcaacgtttaggtcatacagacattaatacaacaatgaatatttacgctcatatgaaaccctaatatggaagaaaaggcctcccaccagttcagtaaactgatgaaagaccttctctgataagatggtttttatgaaaaaagttagcatttttcactcggtatgagcaaaagtacgagcatctatctttttttacttaaaaacccctatatatcgaggctttatgatgtttattacatcatgccgcccataccgcccatgccgcccatgtcaggcattcctgcgccaccggcgttttcttccggtttgtcagcgacaacggcttcagttgtcaggagcattgctgctacagaagctgcgttttgcagagcagaacgcgtcacttttgtcgggtcaacgatacctttttcgatcatgtttacccattcgccagttgcagcgttgaagcctacgccgattttttcgtttttcaggcgctcaacgatgacagatccttcaagacctgcattgtgtgcgatttgacggatcggctcttcaagcgcgcgaagcacgatgttgatacctgtttgcgcatcgccttcagcttccactgcagcgactttgttgtatacgttgacaagcgctgtaccaccgccggatacgataccttcttcaacagctgcgcgagttgagttgagggcgtcttcgatgcgaagtttgcgctctttcagctcagtttcagtcgcagcgccgactttgatgacagctacgccgccggcaagtttcgcaagacgctcttgtaatttttctctgtcgaattcagaagttgtttcttccacttgagcgcggatttggttgacgcgtgcagcgattttttcagtgtcgccggcgccttctacgattgttgtgttttctttcgttaccacaactttagaagcgcgtcccaattgtccgatttcagtagatttcaggtcaaggcctaagtcttctgtgattacttctccgcctgtaagaacagagatgtcttcaagcattgctttacggcggtcaccgaagccaggagctttaacggcaacagcgttgaatgtgccgcgaagtttgttgacaacgagtgtagcaagcgcttcaccttcaacatcttcagcgatcagaagcaatggtttgccttgctgtacaacttgctcaagcacaggaaggatttcttggatgtttgtgatttttttgtctgtgattaagatgtaaggattgtcaagaaccgcttccatcttatcagagtcagtcaccatgtaaggagacgcatatccgcggtcgaattgcataccttcaacaacttcaagctcagttgtgaaacctttagactcttcgattgtgatgacgccgtcgtttcctacgcgctccattgcttcagcgataaggcttccgacttcctcatcagcagcagagatcgcagcaacctgagcgatagactctttgccttcgatcggcttagaaatttcttttaagttttcgattgctacagtcacggcttgttccatacctttacgcacgccgacagggttagcccccgcagttacgtttttaaggccttcgcggatcatagcctgcgcaagtacagtcgcagtcgtcgtaccgtcaccggcaacgtcgtttgttttgctggctacttcagctacaagcttcgcacccatgttttcaaacgcatcttcaagttcaatttcttttgcgattgtcacaccgtcatttgtaattaacggagaaccgaattttttctccagaaccacgttgcgtccttttggccctaaagttacttttacagcgtcagcaagcgcatcgacaccgcgaagcatagcgcggcgtgcttcttcactaaacttaatatcttttgccatgttaacgaaacctcctcgaatttttaaaaatatttatttgcttagccgattacagctaaaatgtcgctttcacgtaagattaagtattcagtaccttcgtatttcacttcagtaccggcgtattttgagaagataatgcggtcgccctcttttacttctaaagcaacgcgctctccgctttccaacacgcgacctgaaccggctgccacgattttgccttcttgcggcttttcttttgcagaatccggtaatacgattccgctggcagttttttcttcagattctacgagttcaatgacaacgcgatcacctaatggctttaacaatgtaataacctcctcaatagtatgaatatgtaattttagcactcagctctaaagagtgctaacacaattattataataaagaatctcacttccaatttcaagtcataagaataaaaaattttcacgcttacatcattctctcttacagcgattttctccttttttcacgtctggttcacttatgttacaataagaacaaataagttgattttataggataaaggagtacatatcatttgagaaaacagtattggtatatcattttgacatatgttatcatgcagctttccgcattgatcggcattcctttaatgtacaaattcggctatgcgggcgggcaccctacgaatgcgaatctcaccatggctcaggggatttattccgtcgtaagcttttttatctgcctgattatcgttctcttgattttgagaaccgcgccgaagcagacattaagaaacgggaagaaagcatccgccggcatgtccgttctctgggcggtcgcgggaatatggctcgctttattttctcagggtatcgccggaatgattgagcagtatgtctttcacgtgaacagcggttctgaaaacacgaaagccattctcaacattattaaagccatgccgctcatgattatcgtttcttctatcgtcgggccgattcttgaagaaatcattttccggaaaatcatcttcggtgtattatatgaaaaaacgaatttctttatcgccggactgatcagttccgtcattttcggcattgtgcatcaggacctcacacacctgctgctatatacggccatgggctttacctttgcgttcttgtatgtgcagacgaaacggattattgtgccgatattcgcccatgtcatgatgaataccattgtcgtggtcatgcagctcggccccgcccaaaaatatattgaacagcatagtgaacaaatgcaattaattattggaggattgtttgtatgaggaacccaatgacttggggcttgatttatttcgcagtcggctgtatctttacgtatttggccgcaagctcgccgggaagcatgtggtctttttattccatactgctgatggttttcgccgcttataatatcagcatctcgtttaaaatgttcgctttctcatttaaagtgaagaaaaatcaaaaataaaagaaaagccatttctcatcatggagaaatggctttttttatgctgatacgtcctgatcggattcactgctgccggtctgccttttccggtacgccgcttttgagatcaggatactgatctcatataaaatgcaaagcggaatcgtaatcatcaagtgagacagcagctcaggcggcgcaatcatcgcggcgatcacgagcagcacaaaatacgcgtacttcctgatcttcgataaaaacatcggcgtgatcacgccgagtctcgttaaaaacatgatcagcaccggcatctgaaacagcagcccaaaaggaatcgtcagctgcagcagaaaatgaaagtactcggtaatcccgatcacctggttgacatcgaggtcattcgagacccgcttcataaaatcaacgaccagcggaaataaaatataataagaaaacgacacaccgccgacaaacagcacgatcgaaatcggaatatagctgagtgttactttgcgctccttctcatacagacccgggctgacaaacgcccaaatctgatagagaataatcggcgaagtcaaaatgatgccgatgataaacgcgaactgcaaaaagataaacagcggatccgtcaggttaaaagcattaagggtgagctcttttacttcatcggctttttgaagatacacaatgataggttttgccagaaaaaagccggcaataaagaaaaccgtaaaggataacgccacaatcagcaatcgtttccgaagttcggcaatatgctccacaagcgtcatttgattcactctcatacgcgtcatcctatcttactgttcttctttctttttttcctcttcttcaccggctaatcccttagtagcgttcttaaattcacgaagcgtgtcccccgccgcttttcctaattcgggaagcttcttcggaccgaaaataatcaccgccaccacaccgataaccgccaggcttccaggaccgatcatgtgcagctcctcctttcgctattcaatttcttccaaaacagaataatgcttcaagaaataaaccaatgattgaagctctacagctaaatctatatgatgaattcgaatgtgatccggcacattcaaacgggccggcgtaaagttaaggatccccttgattccgagcgacacgagccggtcggtgattgactgggcggcaaccgcaggaacggtaagaatcgccacgggttcatccttaatgtgaagctctaaatcattaagatcaaagacaggcacaccgcctacctcagttcctattttactctgattcacatcaaaagccatagatatttttgtgttattattttttgtgaaattatagtgaagaaacgccgtccctaaattcccgacaccgatcaaaatgacgttcgtcgtttcatcctgatccagtgtttttctgaaaaatgacagcaggtaatccacattatagccgtatccttttttgccgagcgccccgaaataggaaaaatcccggcggatcgtggccgaatcgacttttaccgcgtcgctcagttcagctgatgaaacgcgctgttttcctgacgcgtgtaaattctttaaaaagcgataataaagcggcagccgttttgccgtcgcctgtggaatttttgattgatccttgttcatgattggtcctccactttatactcagatgcatctcttttaaaatcaccgtttttgcctcctgtcttttccatgaggcaggtcgggccgatgaccattcctttatccagcgccttgcacatgtcataaacggtcaaagcgcagactgaagcggaagttagcgcttccatttccacacctgtactccctttcgtttttacgcttgcctgtatatgaagaacggcttcggaatccttttcctcccagccgaatgaaatgtcgacgctgcttaaagaaagcgggtggcacatcgggataatcgctgacgtctgctttgcggccataattcctgccacctgtgcgacagccagcacgtctccttttccgatctcgcggtttttgattctgctgtacacgtcatgcttcatgtgtacgctggatatcgcagcggcagtacggactgttgaagatttatcgcttatatccaccatgcgggcacggccttcttcattaaaatgagaaaatccattcatatttaaactctccttacttctgatcatacactattttctccctgatgtcttatcctataatgttccaattctgatgtattgtttgctgacagcaggttgataagctacacttaacttattataacagaggtgaaataatatgatgatcttacaaattaatcagctatccaaatcttttggcgctgatcctattttaaacaatataaagcttgaagtcagatctcgggatcgcatcgccatagtaggcagaaacggagccggcaaatcaactctccttaaaattatcgcaggtcacctttcatatgaaaagggtgaattaatcaaaccgaaagaattaacgatgggatatcttgcccagcacacaggcttggaatcccagcttaccataaaagaagaactgctgagcgtttttgatttcctgaaagcaatggaaaaagaaatgcgctctattgaagaaaagatggccacggccgcccccgcggagcttgagacgctgatgaaaacctatgacaggcttcagcaggatttcaaggataaaggcggctatcaatatgaagcggatgtccgatctatccttcacggcctcggcttcggaaaatttgacgattccgtgaaagtgcaaagtctgagcggcggtcagaaaacaagacttgcgctcggaaaactgctgctgacccagcctgatctccttattctggatgaaccgacgaaccatctcgacatcgatacgcttacatggcttgagcattatttacagggatattcaggcgccattctgatcgtttcccacgacagatactttcttgataaagtcgtcagccaagtgtacgaggtctcacggacagaaagcaaaaaatatctcggcaactacagcgcctatttagaacaaaaagccgagcagtacgagaaagacctgaagctgtatgaaaaacagcaggacgaaatcgccaaacttcaagattttgtcgaccgcaatctggccagagcttctacaacgaaaagagcccaaagcagaagaaaacagcttgaacggatggacgtcatggcaaagccgctcggggatgaaaaatcagccgccttccgttttgacattacaaaacagagcggaaacgacgtcctgcgcgtacaggatgtttccatcagctatgacggccagccgccgctcttgaaaaacctgaccttcggcattacaagaggcgaaagcgccgccctcgtcggaccgaacggaatcggcaaatcaaccttgctgaaaaccattatgaacacgctcagccccgaatccggatcgatcacgtacggttccaatgtcacaatcggctattatgatcaggagcaggctgaactgacctcgtccaaacgcgtgctggacgagctgtgggatgaatatccggacatgccggaaaaagagatcaggacatgcctcggcaacttcctgttcagcggagacgatgtcctgaaacctgtccgttctctaagcggcggtgagaaagcaagagtcgcgcttgccaagctgatgctgcaaaaagcaaactttctcatccttgatgaaccgacaaaccaccttgatctggacagtaaagaagtgctggaaaacgccctgatcgactatccgggaacactgttatttgtatcgcatgaccgctactttattaacaggatcgccacaagggtgctggagctgtctccggatcatgcagaagaatatttgggtgactatgactattacaccgagaaaaaagcccagcagctggaactggaagaaatgaagcggcaggaaaaagagcaggctcagcctgccggcaaggtcaaacaggatacgaaaagaacttacgaggaagaaaaagaatggaagaagaaagaacggcagcgcctgagacgcattgaagaaatcgaagcggccgtctcatccgccgaagagaaaatcagcgccaatgaggagctgctgtgcgaccctgacgtgtatcaggatcatgaaaaggtacagaccattcacgcggagaatgaagctctgaatcaagagctcgaaaacttattagcagaatgggaggaactctccttagaagaatagaaaaagtcaagcacctctttaaggggtgcttttttatccacagctatcctccttgtcagccatataagtaagcgttttatacacactatccacaaaattttctgactttatccactttactaacaacttacagtcccttatccagcctggatttctgaatatattcacaatcctgtggatatgttagaattatctgttaataagtaaaaaaagcctcacgttttacaacgtgagacgatcaaaagatgttaattccaaaccgggctgtccgttcatatcatatgagccccggatccccttttcaaaagcaacggttccggcagccgcaatcatcgctgcattgtccgtgcataaagaaagcggcgggatgataagctcgggatctcccgaatggctgaattcctgctgcagtgcggctctcagccctttgttagcggctacgccccctgccagcagcacttgtttaaccccgtattctttcgcggccttagaggtttttgccgtcagtacatcaatgacactctgctgaaagcttgcggcaagatcctcaggaggaatcacctcatttttttgcgaggcgttatgaagcgtgttaatcacggctgacttcaggccgctgaagctgaaattgtaagacccttcctccagccacgcacgcggaagcggaatggaatccgttcccacagcagccagcttatcaatctgcggccctcccggataaggaagccccatcgttcttgccactttgtcgtaagcttcgcctgcggcatcatccagcgtttcaccgataacctcgaatgaaccatgctctttcatataaaccaattccgtatgtccgcctgacacaaccaaagcaagcgccgggaattgaagctctcctatcagcctgtttgcataaatatgacccgcaatgtgatgaacgccgactagcggtatttgatgggcaaagcttaacgcctttgccgcattgactccgattaacagggctccgacaagtccgggtccttccgttacggcaatcgcatcaaggtcatcaaagcccatctccgcttttaaaagagcttcctcaatcacaagggtaatctgctccacatgatgtctggacgctatttcaggcacgaccccgccgaaacgtttatggctttcaatttgagaagcgacaacgtttgaaataatttcattcccgttttttacgactgaggccgctgtttcatcacagcttgtttcgattcctaatacataaatatcttgtttttcactcatgtaatgtcacccacattaataacgcatcttctccgttatctgtatagtattgttttctgattcctccggcctgaagaccgaattttttatataaggattgggcgggatgatttgagaccctgacttcgagagagagccttcttgcctttttttctctgcacaattctatcgcagagcgaaacagcgcttctcccaatgattggccccgatattccggcttaatggctatgttcgtgatctgcgcgtcatctataataatccagattccgcaataccccgccagacagccgtccttttcaatgacaaggtagtgagcatacggattttccaaaagctcatgataaaatgaatccttcgtccacggagaagtaaaggatgctgtttcaatttcataaatttgatcaatatcttccggacgcatgcttcgaatcgccgttttcgttttcatccctatcaccctatttttgagattccatccatttcgcttcagcctctgccagacgcaaataatccggaacaaggctgtggacatccgcttcctctttttctaagcctaaaaacgccagctctgacggccgcggattatgctgtgcagccgttccaatcactgcttgagatgtcagctcatgcagaatggtttcttcatgaatggctgtatcgtgccctaaaaataaaaccggagacgctttttctttcagcatgccgagccaatcagtcaaaaggacattctgatctggaagaacggattgtaatcggccgtcctgatattcataaagtcccgtatatacctgtccgcgccgggcatcaaataacgggcagatcagtccttgaaagtgccgtccgttagccgccagcacctccaggctcgagacagctgaaaccggaagcttcagcgaccatgccaatgtttttgccagcgtcacaccgattctgacacctgtgtacgatcccggtcctttcgccaccgctattttcgtaaggtcctgcggtgttatgccgcaatccttcagcaatgaattgacagcaggcatggcccgcacggaatgattcttttttaaatatgtaatatactccgccatcaccgttttgtcacgaacgagcgcggcacccagtgtgtaatttgacgtatcaattgccagtattgtcatgtttatttatctcctcacaaagcgtttcataccgtgttccgcaagccgtaaaggtaatgtcccttgcctcatcaccggctcttgtgatgacgatctgcagccgttcagcaggcagctgatcctgaattaaatgagcccattcaattaaacagacgccttgtccctcaaaatattcttcaagccctaagtcttcgctttcatcctccatacgatacacatccatatgatatagaggaagcgaaccgtcatggtattcttttataattgtaaaagtcgggctgtttaccactttcgtgattcccagtccttcggcaaaaccctttgtaaaagtcgtttttcccgcgcctaagtcgccttccagtgtcaaaatgtctcccggctttgccaaagaagcggcaagcttggctacggctttcgtttcttcggggtttttcgttctccattgtaatgtcttcaaagtgagtcacccgtcttatttaaaatgattgtatccttttttctcaaggacgatttgtctctgatcattggctgtcaaaagaacacatgcttccttccgttcagttaccgctcctatcttcgcaatcggaatgcccgattgagtgcagtaatcaagcaaagaaatccactcttgctgagaaaccgttccaaccaattcaaaatcttcaccgccaaataacacccatttcttccactcagaatctccctcaggcaaatccggatgcaccggcagaagttgttcttcaatttctatcgtaactgaacttgccccagctatttcatgcagctcactagccaatccgtcactgatatcattcagagccgcgcgctgaagcttagagcagaagcggccgacctgaactctcggaacgggccgtttatgtttttggataaaataatcagtcgtatgaaaagcagaagggagtgtttctcccaataaaagagacagtcctgctgcggacgaaccgatatcccccgtaacaaacacaacatctccgggtcttgccgagcttcgcagacaagcgcaatccttctcaacttctccgatgacagtaacggtaattacggcttgaccggaagcggagacggtatctcccccgatcaaatccatttgatatagtttcgccagttccgccattccttcatacattgcctggacgtcagctttctgccagcaagaaggaaccgctagagacaccaaataaaacttcggaatgcctcccatcgccgccacgtcactaatgttaacagcaagcgccttataaccgatatcatgaggagaggaatactctaatttaaaatggacattctccaccattgtatcaaggcagacaatttgctgcatatggggtgatgctgtataaaccgcaccatcatcaccgatccctacatcgacggaaggatgataatgcgaatgcggcgtaatactgtgaatcaaatcaaactcatccatatatctcccgtctccctttatgacgctcttgtgaaatacagctctttctagtgtatcggattatgtttcaatatccaagactttaacgatataaaagaaagcttggttagataccaagctgccagcatttaaaagaaaacacaaaaaaaacgaaaacatgatcgtttcgtttacaataaaaatggcggtccggacgggactcgaacccgcgacctcctgcgtgacaggcaggcattctaaccaactgaactaccggaccatttattttttggttgcgggggcaggatttgaacctgcgaccttcgggttatgagcccgacgagctaccgaactgctccaccccgcgatgataaaattttagaaaagcttggcggcgtcctactctcacagggggaaacccccgactaccatcggcgctgaagagcttaacttccgtgttcggcatgggaacgggtgtgacctcttcgctatcgccaccaaaccattgagagtgttctctcaaaactagataacagtaagcatacattcaaattggttaagtcctcgatcgattagtatctgtcagctccatgtgtcgccacacttccacctcagacctatcaacctgatcatctttcagggatcttacttccttgcggaatgggaaatctcatcttgaggggggcttcatgcttagatgctttcagcacttatcccgtccgcacatagctacccagcgatgcccttggcagaacaactggtacaccagcggtgcgtccatcccggtcctctcgtactaaggacagctcctctcaaatttcctgcgcccgcgacggatagggaccgaactgtctcacgacgttctgaacccagctcgcgtaccgctttaatgggcgaacagcccaacccttgggaccgactacagccccaggatgcgatgagccgacatcgaggtgccaaacctccccgtcgatgtggactcttgggggagataagcctgttatccccggggtagcttttatccgttgagcgatggcccttccatgcggaaccaccggatcactaagcccgactttcgtccctgctcgacttgtaggtctcgcagtcaagctcccttgtgcctttacactctgcgaatgatttccaaccattctgagggaacctttgggcgcctccgttaccttttaggaggcgaccgccccagtcaaactgcccacctgacactgtctccccgcccgataagggcggcgggttagaaggtcaatacagccagggtagtatcccaccgatgcctccaccgaagctggcgctccggtttccaaggctcctacctatcctgtacaagctgtaccaacattcaatatcaggctgcagtaaagctccacggggtctttccgtcctgtcgcgggtaacctgcatcttcacaggtactataatttcaccgagtctctcgttgagacagtgcccagatcgttgcgcctttcgtgcgggtcggaacttacccgacaaggaatttcgctaccttaggaccgttatagttacggccgccgtttactggggcttcaattcgcaccttcgcttacgctaagcgctcctcttaaccttccagcaccgggcaggcgtcagcccctatacttcgccttacggcttcgcagagacctgtgtttttgctaaacagtcgcctgggcctattcactgcggctctctcgggcttgcaccctaacagagcaccccttctcccgaagttacggggtcattttgccgagttccttaacgagagttctctcgatcaccttaggattctctcctcgcctacctgtgtcggtttgcggtacgggcacctctcacctcgctagaggcttttcttggcagtgtggaatcaggaacttcgctactataattcgctcgccatcacagctcagccttcacgggaaacggatttgcctatttcccagcctaactgcttggacgcggatatccaataccgcgcttaccctatcctcctgcgtccccccattgctcaaatggtgaggaggtggtacaggaatatcaacctgttatccatcgcctacgcctttcggcctcggcttaggtcccgactaaccctgagcggacgagccttcctcaggaaaccttaggcattcggtggaggggattctcacccctctttcgctactcataccggcattctcacttctaagcgctccacaagtccttccggtcttgcttcacagcccttagaacgctctcctaccactgttcgaagaacagtccgcagcttcggtgatacgtttagccccggtacattttcggcgcagagtcactcgaccagtgagctattacgcactctttaaatggtggctgcttctaagccaacatcctggttgtctaagcaactccacatccttttccacttaacgtatactttgggaccttagctggcggtctgggctgtttccctttcgactacggatcttatcactcgcagtctgactcccaaggataagtcatcggcattcggagtttgactgaattcggtaacccggtaggggcccctagtccaatcagtgctctacctccgagactcttaccttgaggctagccctaaagctatttcggagagaaccagctatctccaggttcgattggcatttcacccctacccacacctcatccccgcacttttcaacgtgcgtgggttcgggcctccattcagtgttacctgaacttcaccctggacatgggtagatcacctggtttcgggtctacgaccacgtactcaattcgccctattcagactcgctttcgctgcggctccgcatcttctgcttaaccttgcacgggatcgtaactcgccggttcattctacaaaaggcacgccatcacccgttaacgggctctgactacttgtaggcacacggtttcaggatctctttcactccccttccggggtgcttttcacctttccctcacggtactggttcactatcggtcactagggagtatttagccttgggagatggtcctcccggattccgacggaatttcacgtgttccgccgtactcaggatccactcaggagagaacgaagttttgactacagggctgttacctcctatggcgggcctttccagacctcttcatctacctcgttcctttgtaactccgtacagagtgtcctacaaccccaagaggcaagcctcttggtttgggctggtcccgtttcgctcgccgctactcagggaatcgcatttgctttctcttcctccgggtacttagatgtttcagttccccgggtctgccttctcatatcctatgtattcagatatggataccactccattacgagtggtgggtttccccattcggaaatctccggatcaaagcttgcttacagctccccgaagcatatcggtgttcgtcccgtccttcatcggctcctagtgccaaggcatccaccgtgcgccctttctaacttaaccgttaaaaagaatcactacgtgatatcttgcattactaattgaatgtgaattacttctgttatctagttttcaaagaacaacgcataggacatgctaacacatgcgttgccacaggaagtggcgcatttagcaggtgttcctatgttttgaaggaatgatccttcaaaactaaacaagacagggaacgttctgtttataagacccaaggtcttatattccgttaaaatccttagaaaggaggtgatccagccgcaccttccgatacggctaccttgttacgacttcaccccaatcatctgtcccaccttcggcggctggctcctaaaaggttacctcaccgacttcgggtgttacaaactctcgtggtgtgacgggcggtgtgtacaaggcccgggaacgtattcaccgcggcatgctgatccgcgattactagcgattccagcttcacgcagtcgagttgcagactgcgatccgaactgagaacagatttgtgggattggcttaacctcgcggtttcgctaccctttgttctgtccattgtagcacgtgtgtagcccaggtcataaggggcatgatgatttgacgtcatccccaccttcctccggtttgtcaccggcagtcaccttagagtgcccaactgaatgctggcaactaagatcaagggttgcgctcgttgcgggacttaacccaacatctcacgacacgagctgacgacaaccatgcaccacctgtcactctgcccccgaaggggacgtcctatctctaggattgtcagaggatgtcaagacctggtaaggttcttcgcgttgcttcgaattaaaccacatgctccaccgcttgtgcgggcccccgtcaattcctttgagtttcagtcttgcgaccgtactccccaggcggagtgcttaatgcgttagctgcagcactaaggggcggaaaccccctaacacttagcactcatcgtttacggcgtggactaccagggtatctaatcctgttcgctccccacgctttcgctcctcagcgtcagttacagaccagagagtcgccttcgccactggtgttcctccacatctctacgcatttcaccgctacacgtggaattccactctcctcttctgcactcaagttccccagtttccaatgaccctccccggttgagccgggggctttcacatcagacttaagaaaccgcctgcgagccctttacgcccaataattccggacaacgcttgccacctacgtattaccgcggctgctggcacgtagttagccgtggctttctggttaggtaccgtcaaggtgccgccctatttgaacggcacttgttcttccctaacaacagagctttacgatccgaaaaccttcatcactcacgcggcgttgctccgtcagactttcgtccattgcggaagattccctactgctgcctcccgtaggagtctgggccgtgtctcagtcccagtgtggccgatcaccctctcaggtcggctacgcatcgtcgccttggtgagccgttacctcaccaactagctaatgcgccgcgggtccatctgtaagtggtagccgaagccaccttttatgtctgaatcatgcgattcagacaaccatccggtattagccccggtttcccggagttatcccagtcttacaggcaggttacccacgtgttactcacccgtccgccgctaacatcagggagcaagctcccatctgtccgctcgacttgcatgtattaggcacgccgccagcgttcgtcctgagccaggatcaaactctccgataaagtagtttgactgactacgcacatcactgtgcgatttatttaaaactttgaattaacaggtacgttttgtcttgtttagttttcaaagatcattataatggagcgggtgatgagaatcgaactcacgacatcagcttggaaggctgaggttttaccactaaactacacccgcgtttgaattggcgcgcccgagaggagtcgaacccctaaccttttgatccgtagtcaaacgctctatccaattgagctacgggcgcttatcaggcgacttaactatcatactaccaatcggttatgatgtcaagtgtttttttatttcttttcgaagtctttttctcgaccttgtttattatacacgcttttgagaatttgtaaagtctttttttgaaagatcattttctcatttgtcgttttcgctttgttcatcagcgacgtttaataatataccatgcacttcaaattaggtcaacacttttacgaaacttttttctcacttgttattcccttctatataataaataaaaaagcaggattcctaggaaccccgcgtctattcagattacccgctcaccttggcttccgcgctattacgatctgttttttcataagcacggaagttttgttcaagctgttcgagcgacagacctttcgtttccggaaggaaccttttcacaaatataacggacgctatccctaacaggacaaaaatgaagaaggttgcagacaatccgatgtttgcgagcaggaccggaaaagtgaaaccaacaaggaagttcacaatccagaggcagaagacagtgacccccataccaagtccccgcaatcgaagcgggaatatctccgacagcatcagccaggtcaccggagagacagccccctgctgaaacgcaaggaaagtgactgttaatgaaagaaccacataaggaagagcaggcgatcctttcagcacgactgacagaactccgatcaaaagcagcaccgcagtcgttccgatcagccccgtcatcagcatcgggcggcggccgactttgccgagaagccatattcctacaaaagtcgcgagcaccgaaatcacaccgttagcgatattgccgattaatgcggcttttgtctcgaaaccagcatcttttaaaatttgagttccataatacataattgaattcacgccggtgagctgctgcactaccgcaattccgatcccgataaacacaatgcggcgcacccacggaacggcaagatccttaaaggcggcctgctccatctcagcttccttatgaaaggcagattcaatctcagcgagctcagacttcgctttctcttcattccttattcgccggagaacgtgcagagcatcttcttttcttcctttagaaaccagccagcgcggactttcaggaactttcagcataccgaaaaacaagaataccgccggaagggccgcgataacgagcatatagcgccaggcgtgagaggtatcaccaagcacattgccgatgacagcattacacgtgaaggcaagcagctggcctgttacaatcatcaattcattttgggtaaccattctccctcggctttccgccggcgacatttcagccaaatacgccggaacggttacggatgctcccccgacggcaagccccagcagaaaacgggagatgaccataacagatacgttaggcgccagtgtacatccaagcgtcgccgcaaagaacaaaacggcaaggataaggatatttttacgtctgccgttatagtccgacaatctccctccgaaaactgctccgatcgcagcccccaagagcagggagctcgccaccatcccttcagtcaaagcggtaagattaagctggtcagcttccgccataaacggcagcgccccattaattacacctgtatcgtagccgaaaagtagacccccgaacgtcgatactaaaatgatggttctcaaaaatgaatgctggctgctatttttattcatcttcaaatcctcctaatttttacatagagataatatcggaatattcagttatcaatatttgcacctataacgtctgcatacaagttctgaccgtacaaaacagttatataagaagaaaatagcctgaaagcgttatcatttatagtgattatccactctccctctcgtcaaattgttattttatagttactttgtagtgaagttataatgatattattggcatttatgttattatcataattttaaaagcgctttcagtcaataaatatttcagaaaattttataacttacctttatattacctatatgtaatcaatttatgtttttaatcaactcattttcactatatgatcaatagttaatctctttttgataaataattgattatatattaaaaacccccaatcagcagttgggggtttttgatttattcttcgtttattgtaacgatcgttcttcctctcgcttctccttttaaaagagcaggaagcgtatccggcagctcttcaagtgtaatttccttttgaataaaggcctccagatctgcaggcttgaagtcatcagctaaacgctgccatgttttctttcttgtctccatcggacagaatacggaatcgattcccaagagactgacgccgcgcaatataaacggaaagactgtagccgggagtttcgttcccgctgtcagtccgctcacagcaactgatccgccgtactgaatctggctgagaactgaagcaagcggctcacctccgaccggatcgacggccgctgcccatttttgtttttgcattggttttaacgtgccgttatacacttcgtcacggtgaatgaccgtctttgctccgaggctcttcaaatagccgctttcgtcttcttttcccgtactggcctcgacctcgtaacctaaggttgaaagaatggagacagcaaagcttccgacgccgcctgtcgctcctgtcaccagcaccttccctttttcaggagcggcatggttttcttcaagacgctggacggacaatgcggcagtgaagccggcggttccgatcgtcatggcttctttaagtgtcagaccttcaggcagcggcacgatccaatctgccggaatgcgggccatcccgctataaccgccaaagcgggaaacacctatgccgtagcttgtcgcaatgactttatccccctctttgaaacgggcgtcatctgaggaaacgacaattcctgctaaatcaattcccggcacgaaaggatacgacgttacgatcttgccgtcaggaatggcagccaagctgtctttataattcacccctgagtagcaaaccttaatcagcacttcaccctcgggaaggtcctgaaccgccagctcccgtacgctgactgaaaaccggtcttcacgttgatcgactactaacgctttaaattgatctgtcatcactacgtctccttaaaatgaattgaatggctttggaaaagcataaaataagtttgatttgttttcaaatgtcctgcctcgtgtagtatgatcaaaagtaaaaacagcgaaagagtggttacgcatcatgtctgataaacaaaacaaagataacaaaaacaacagcagcagcaatcagccattaccggacattattcataccgccgttttcaaggcgccgatacaagttgtctgggatacggtctccactgcggacggcctgtctctctggtttatgccgaatgatttcacacctcaagaagacagtgagtttcagctggaatctccgttcggtccgtctccgtgcaagctgctggatattgaagcgccgtaccgcctttctttttcgtgggatacggaaggctggatcgtttcttttgtcttaaaggaaacggaaagcggagatacggaattcactctcattcacggcggatggaaagagccggaagccgtcatcaataaagtcaatcggaaaagctccgagattcacagtacgatggatcaaggatggaacgggcttgtcaacacgaaacttcgcggggctgttgaggcttaacacagaaggacggacacgctttccgtcctttttttgatgccgatacataaaaactgactttgcaaagacactaacagaagaaccgaaaacttctttcagggggcgctgtttatgtattattacaaagaagagctgatcaatatcattaaaccggacaagccggacccggccgcggccaaggtgcttcaggaaattttaggcgggcactacggagaaatgcggacgatgatgcaatactttttccaaagctctaatttcagaggaaaagaaaaacagttccgtgacctgcttcgcggtgtatttttagaagagatcgcacacgttgagcttgtccagcatacgattaatgcgctgctcgacgaaagcggcgctgagggccccggaaatcaggcagcagatcaggcgccgcttgacgaagcagttaaacacgccaatccgcaccattttatcatcggagcgcaaagttctcttcctgtagacgccggcggcaatccgtggaacgggtcttgggtatacaaccacgggaatctgatttccgatttattggacaatgtcgtgctggaatcaaccggcgtgctgcaaaagacgcgcatttatgaaatgagttcaaatcagacgttcagagaaacactcggttttctgatcgtccgtgacaacgcccatcaaaatgcatttacaaaagcgttggaaacactgggtgtcgaatggggcaaattatttcccgtgccgaattatgatattgaaaaatacccggaatgccggaaattcgttgagatgggttatcataatactcaatttaatttcagactggatccgacacggatcggagaaattctgcagggaacgacgccgagccgaaacggcggcgaattaagtgtgtccgagcctcctaaaggtttccccgtgccggaacttcctgagcttccgaatgagcacagccccggactgaaagatatgaacttgtaacaaaaaaacgcctgtttcgggcgttttttgtttttctgaatatgaggtttgaatgtgtttaaaacggggaatataagccgggagatcttgccatacggccgttattataatgtgagcacattgctgtacatacttcgtttcgaaagttgtcctaattttccagccggccggctgggtatgtttgaatgataatgggaattatgtaaagagaacaatgtcttttctaaggaggcagcgaatgtctaagcaaggaaacttccagaaaactatgtcactttttgatcttattttaatcggcatgggagccatattcggttcggcatggctgtttgccgtcagcaacgtcgcctctaaagcgggcccatcaggcgttttttcctggctgatcggcgggggaatcatcttattgatcggcttggtttatgcggaactgggcgccgcgctgccgcggaccgggggaattatccggtatcccgtatattcacacggacacctcgtcggatatttaatttcctttgtcaccattgtggcatacacgagtcttatttctatagaagtcacggcagtccgccaatacgtggcgtattggtttcccggtttgaccgtaaaaggctccgattctccgacaattgccgggtggatattgcaatttgcgctgctctgcctgttcttcctcctcaattactggagtgtcaaaacctttgcgaaagcaaacttcattatttcgatttttaaatatgtcgtaccgattacggtaattgtggtactgatttttcattttcacccgggcaatatgaccgttcacggattcgcgccttttggcttcaccggaattcaggccgcgatttccacaggcggcgtcatgtttgcataccttgggctgcatccgattgtggctgtcgcgagtgaagtgcagaatccgaagcggaacattccgatcgcattgattgtctgtattatcgtgtctactattatttacaccgtgctgcagctcacttttatcggggcgatcccggcggataccctgaagcacggatggccggctatcgggactgaattctcccttccgttcaaagatatcgccgttttgctcggtttggggtggctggcgacattggtcattttagatgcgattttatcaccgggcggtaacggaaatatctttatgaatacgacttcacgtctcgtctatgcctgggccagaaacggaacattattcagcattttttctaaagtcaataaagaaaccgggacaccgcgtgcctccctttggctttcgttcggtctggctgttttttggacgcttccgttcccttcttggaacgctcttgtcaacgtatgctccgtcgcattgattctgtcttatgcgattgcgccgatttcttctgcggcgctgagagtcaacgcgaagaatattaacagaccgttttatttaaaagggatgagcatcatcgggccgctgtcgtttatttttacctcttatattgtatattggtccggatggcgcaccgtatcctggcttctcggttctcaaattgtcatgtttctgatctatctctgtttcagtaaatatgctcccaaagatgatgtcagcatacggcagcagctgaaatcagcatggtggatcgtcggcttttatgtcatgatgctgattttctcctatctcggctcgttcggccacggattgggcattatcagcaatccgcttgacctgattctgatcgccatcggttcgctcggtatttattactgggcaaaatatacgggactgccgaaggctatgatcgacagtgataaatgacgaatgccggaaagaagtatggtcttctttccggtatttttattttaagggatgacaaaaaagagaacatgcgataaaatgaatgacagtcattcataaaaggaggaacccctctattggcaaaacaaagctcgggaaaatacgaaaagatcctgcaagccgcgattgaagtcatttctgaaaaaggattagacaaagcatccatttcagaaatcgtcaaaaaagccggaacggcccaaggtacgttttatttatatttttcttctaaaaacgcactgatatccgcgattgcagaaaacctgctcgacactacgctggacagaataaaagggaaaacggacggttctgaagatttttggacgttgctggacattttggtagatgagacatttcacatcacccggcttcataaagatattatcgttctctgttattccggtcttgccatcgatcattcaatggagaaatgggaagccatttatcagccttattattcctggctggaaggcgtgatcaatacggccattgaacagggtgaggtccacagcggcattcatgtcagatggacggccagaacgattatcaacgttgtcgagaacgcggctgaacggttttatatcggctgtgaacaggatgtcgatctcgaagtatataaaaaagaaatattcagctttctcaaaagaagcttgcagaaatgattggcagagaccgatcatttttgaccgccgtaaaaatgactgacattcattcataactgaggtgactgtatcatgtattggctgcttgtattgatagccggactgttagaagtagtttgggcgtccgccctgaagcatgcggattcgctctttgattggattggtattttccttctgattgccgtcagctttctgatgctgatccgctcttataaaaaaattccgatggctgccgcatataccgtttttgtcggaataggcaccgtcggcacatatgtaacgggcgtcattttaggcgaatcgttttcaatcgggcaaatattctttttggctttgctgttgtccggcattttaggaatgaaggtatttacgaaagaaactgaaacaaggggtgaacattaatggcatggctgctgttatttattgccggagcggaggaagttgtagcagccgttgccatgaaacatattgacggttttaaaaaaaagtggccgctgattgtcatggtaacaggctttatgctttcattcttttgcctttccggagcgatgcaggttcttcccacaggtgtcgcgtatgcggcttggaccggcatgggaagcatcggcgtttcggccgtgggcatactttggtttaaagaaaaattcaatctgtcacaattggtgtctctagggcttatcctcatcggtgtcatcggcttaaaactgacaacgtaacggcctgagacagctttttaaataaaaaacaaaggaccctaagcgggccctttgttttttatgctgttttgatctgttccgcttttcccgctccgactccgaaaatgaagatcagaacggagactgcgatcagcatgaataacggaaccgtccagccgtgcgtgatgtcatgcagcaaaccgaatacgagcggcccgaacgcggcaagcaggtatccgaatgactgggccatgccggaaagcgccgcggcttcatgaacatgccgggtccgcaggctgaagaacatcatcgccaagctgaacgcacagcctcccgcaattccgattaaaatgacccatagcggagtgagagccgggcttccgaaaagaacgccggcaatgccgataaggaaaaataaagccgtcagtccggcgagtgcgcgctgatttttcattttagcggcagcgatcggcacgataaaagtaatcggcaggactgagaattgcattaatgaaagcatccatcccgccttacttgagctgagtccattctgctgaagaatttccggcagccaagcgatgacggtgtaaaaaataagggattgcagccccatgaacatcgtcaccttccaagcaagcggagaccgcagcagactgcttttcttctctccgtttgtcccagtcgtgcggacgggcagttcgcgtcctcgcatttgcggaatccacatgacaaacgcaatgaaagaaaggatagcccagcagccgagcgcgcctttccagcctaaccccgctgaagaggcgatcggcacgctgatgccggatgcaatcgcgccgcacagattcatagaaaccgagtagacgccggtcatgatgcctaaatttccgggaaacttatgtttaatgagactcggcagcaggacgttgcatacggcgatcgacaatcccaacaggatcgttccgaaaaagagagtgccgattccggcgatggagcgcagcagagttccggctgtcaggacaattaatgatgacagtaacacaatctcggtcccgaagcgccgggacaataaaggaacaaacggcgacagacatgcaaaggccaaaagcggcactgtcgtaatggtgccggcagccgcattggtcatgccgaggctgtcccgaattgaggaaacgagcggcccgaccgatgtcagaggcgctctgaggttggcccctatcaatatgactccgatgaccagcaatatcagttttttacgctgacttgcttgcagaatttgatgttcgtctttaattttcatgttcatcctccatgtgtattgtatctttaaatactgtgatgtattggttgacggcctccatggcctgatccggtttctgtccgataatcgcggcggcaagctgggtgtggatccgtatagcaggggtgatttccaacaggttatggactgacgcacaaagcgcctccgtcatatgctcgtatagatcagaaagcatgttgttatgggccgcctgtacaatggttttgtgcagtttaatgtcagcctcggcataccgttttcgatcttcattttgcaaggccgcttcacattcatccaagcacaccttcagtgctttcaggtcttcgtcattacgcctttccgccgccaatcgtgcagcttctctttcgagtgcgtatctgacttctaatgtttcaagcaaatttgattttttaatatggcggtaaaatgccgcgccgagaacactggatgagctgacatacgtaccgctcccctgccttgtctgaagcaggccggcatgtacgagcgcccgaatggcctcacgcaatgtgtttcggctcacatcaaattgcttcattaaatccagctcagggggaatgcgcgtcccgaccggccatttatccgattgaattaacgattcaatttgcgtcaccacttgttctacgagcgacagtctgcttgttttggatatctccatcaaaacacctctgaaatttgtaggatgattctatcattgggtaatataacataaaagaagcgaagatgtaaatcagcggcaacaaaaaaagagtgagtttttctctcactcttcggcgcttttatgaacgttttatattgactgaggtgacgacaaacttgtcatgacggtggcgggaaaatgaatattcaaagggagtgccgttgtccaaaaagcctacatgctcgacttcaagtatcgggtcatccggccggcagccgagatattgctgatccatatcatccgacttgcacgctctgatttttctgtgtgagcctgcgattttgagctggagttcccgcgtaatatgatcgtagatggaatggttgagcacctcgtcattaatgccgggtataaggctcgccggcatgtacgttttttcaagaacgtacggttcgccttcaacaattctgagcctcactacataatagacgggagtcttttcatcgatggccaaatgtgcggcgacatcttgagacggaaactgcacttcaaaccggatgaccttgctcttgatatctttgccttttaacaaattgctcaggccgagaatttcgttgctgactacgtgaacgtgctcatcctgcatggctgattgaatgataaacgtgccgtgccctctttttctgaaaagcattccttcagccgcaagtgtatcaagcgcccgcttcatcgtcatccggctgcacccgaactccgcagcgagcgtcttttcatccgggatcggctgatctatgtcatatacactgcttttaatcctctttctcatttcgttggcgattttttcgtacttattcatcggtttcctccggctgtataatgtttgatctgtatagactccttacggttatcataaatttttttccctgcttcatcaatgacgttacagccgccgatattgaaattgaaaggatttcctcaaattttctatggaatctcgctcactattatggtagaattttttgcagaaaaggacacaaccgaataatgcatacattgtataacctcaatgatatggtttgagggtgtctaccaggaaccgtaaaatcctgattacaaaaattgtcccgtacactttttgtaatcaggattttttattttctaaaaaataaaaaaaggagtatctgtacatgaatttcaaagtatttctgcttgcagcatctaccatcgcagtcggattagttgaattaattgtgggcggtattcttccgcaaatcgcttccgacttagatatatccatcgtcagcgcggggcagctgatcagcgtgtttgcgctcggttacgcggtatccggcccgctgcttttggcagtgacggcaaaggctgaacgaaagcggctttatttaatcgcactgtttattttcttcctaagtaatctggtggcttatttcagtcccaatttcgccgtacttatggtgtcacgggttctcgcttccatgagcacagggctgattgtcgtcctttctttaacgattgctcctaaaatcgtggcgcctgaatacagagcgcgggcgatcggcatcattttcatggggttcagctcggcaatcgctttaggcgtgcctgtcggtattatcatcagcaatgccttcggatggcgcgttctattcttgggaatcggcgtattatctctcgtttccatgctgattatcagcgtcttttttgaaaaaatacctgccgaaaaaatgattccgtttcgtgagcagatcaagacgatcgggaccgccaaaattgccagcgcacatcttgtcaccttgtttacattggcggggcattacacactctatgcctactttgcgccttttttggaaagaacgcttcatttgagttccgtttgggtcagtgtatgctactttttgttcggtctgtcagcggtatgcggcggcccgttcggaggctggctgtatgaccgtttaggagcatttaaaagcatcatgcttgtgaccgtttctttcgctctgatcctgtttattcttccgctgacaacggtttctttaatcattttcctgcctgcgatggtgatctggggattgctcagctggagccttgcgccggcgcagcaaagctatttaatcaaaattgcgcctgagtcttccgatattcagcaaagcttcaacacgtccgctttgcagatcggcatcgcgctcgggtcagccatcggcggcggcgtgatcggacaaaccggttctgtcacagcaacagcctggtgcggcggtttgattgtcattatcgctgtcgcgttagctgtattctctttaacgagacctgccttgaaaagaaaatccgcataaatgtgagaccgcaaaaaagccaaaggaattccttcggcttttgcggtctttttattttgcggcagcaagctcgtcttctgtcacccatttatgattggttactttttggccgccgtcagtcggtgtatagtcgaccatatagacggttgtctttttggctgaatcaataacggcttcggcgcccttcatgcctttcatatgggatgcctcgatcacggccttatcacccggttttaacgttttatcaccggcgcccttcagctcttcctgaatgacccatttatgatcttcgacgcgctttcctcccgtttccggagtgtaagatacactgtaaaccgttgtatcataagcaccttttacggttccttgcgcatttttcatgcctttcatatgagaagctaaaatcataacgtcactgccgaccttataagtcggattttctgccttctttaaacctttcggcacctcggatgaacctgagtgattcatgtcttcgtgagagtgcgtttctttgtctttcgctttttcgcttcctcctgaagattggctgttgcatccggcaagcgccagaacggggatcaggagaaacatgctgaataaaaatagtctcgctttcatttcaagaactcctttgcctttttgatttttcactttccctttcgtttcttcagtaaaacaaaaagattgcctgtcatttctcctaattcttcaactctctctttattgcctttcatcaggtgaaattgttcacaaaatgtacacattaatggagatgcagtataattcaattatcagataatagggggaactcatcatgaaaacgaaggtttttgcggtggtattgggcgctgttttaatgattgcggggttggttttggcagaagtttcgctttatatggaatacatcacaatgctcggagctatgattttttcttctatatttatgtcagagccgaaaagaaaatttcgcgtcatcaaaggggtttgacttttctattaccgccgtcttctcaggacggcggttttgttttgcatgtcactcagtctatccgcacagccgtttcttctgtgccgtcctgatataaaacaaaatgtggggctgtttgtgctttatcacctgcaaattcaatttcaagcggcagcgccctgacaaaataacgggtttccgtcattgggaataattcgaatggagtctgcccgtctattgtaagatacaatcggttttcttttaccgccaccgatgcatgtgtgtcatcctgaaatgagtaattgccggtaaatctgctgtaaatcgcaggatcgatatctgcttttttctgatctgccggacgtttcggaatcacgtatggctgatcaaataagatgtttacagccgcggcaattacagcttgttcaaattgatacgattgttccatattgctgagataaatcaatgttttattctggtcaatataccggatcatcagagttgaatagcccggccagcctccgtcgtgactgataaccttccctttttgggggctgttttgaatcatccagccaaatccgtatccgaattgctcttcttcattccaatagcccggtgtaaacgcttgatctttagactctttgccgatgatttcttccgtataaaaagcctgatcaaacagatataaatctctaatagcggagttaacggttccgtcaccttgaatgccgtcaagaaagacgacataatcagtttcctcaagttcatccggcagcacatattctccggaatgaacatcatacacatagccatatgcatagttcggaatgttttctttactcagccttctgttataaatccgcgtatcgtgcatacgaagcggatgaaatacggcttgtttcataaattcagcaaaactcatgcctgatacaatttctataataaccgctaacaccacataccccgtattactgtaaagccactccttgcccggcgggaaataagcatccggcttatgctgcttgagcatattgatcacatcttgattaacggcaattctgtcccggtcccaatgtgttaagaacaactccatatagtccggcaatcctgacgtatgatggagtaaatgccgaatggtaatgtccggataaggaaaatcaggaagccaccgctctatcatatcgtcataacgcagcttcccttgctgctctaaaatgataacgcctaaagctgtaaacggcttcgatactgaggccaattcaaagaccgattggtcattcagcatcctctttgttttcagttctgcagcgccgaatgaaccctggtataagatgcggccgttttccgctgccaatacagcgccgtttatttcatgtctttcgtctaaagtgctgaaaagctgttcaaacgcttgttttttcttatcgttcatttcacgaacctccatatacaagctgatttactcttttatacgaacggccgctttagaagtttcaatattttcccttctcgaaacacagtcagtatactgccgttcaggcagccgcggaggtttgatgaatgtcttttattcacacaatactgtgcaggcttcaaattcaacatgcttctcgtctttatttgcaccggcaatttccatagtcgaaaacatcgcgcagacgacggctttgtattcgttcatgacggtttgaatttcaatcaggaaccgttcggatgaagccgcgtattccgttacgtactctttcattttgccgataatatcatctgcctgacggctgaagccggccgcctccaagtcactctcaaactggtttttgttgatcatatgaatatgcatttttcaaggccccttcagcagcattttgtggttatatctactgtaaaggacagacttggataaacttttaataaaatatgaacaaaatatgaattggctcatcggcctgaccggcgggctttcggctgtgctccgtttcatttggactacatgaaataatgacttctttactctgttaaaaacagctcatatatgatctaataccagtaaaatgtttaggaggcggcctatgtcagcagcaggaaatcggcaaaaattttgggtcatggcgatgcttatagcggtcttcaccgtgttcgttttctctttttctgagaatcattcacaaaagaactggcacacggcggttgaccaggcgtcagtgaatgtcttcggccagcagatctttgaaaaagaccgtctggcaaaaacactcgacgcacgtgaggcagaatctcttttgactcttgtgaaacttgcaaatgcagaacatcacatcatctaaaagccattataaaaagcctgtttccctttgacagaggaaacaggctttttccatgtattattgagcatgtttttgttcaataaaccggtcgatccgggcgagaacatccttcatgtccgtacattctttaaagctttcattaatggcttgaatgccttgtttgtattttccgttatgcagcacttcttccgcggcaagctttaccttttcagcgcttacttcatctttttgcactgtatagcctgcatccaattcagtcaggcggcgcgcaaccatcggctggtctttatcatgcgggatgacgaccagcggcacttgataatgaatgccttcatttacactgttcattccgccatgcgtgacaaacacgtcggcctgctccagcacttcaagctgcggcacgtacggggcgatgataaagttttccggcgcctgtttgattttcgacagatcggctttttccccggcggcaatgactacttttccttcaaaatctgagaacgcgtctatgcacagattgaaaaacgcttccgtgtccccgagcaccgttcccattgagatataaatgactttttcattctttaatgcgtcaatcgggaagtcgacgcgcccttttctcttcggaaaactcggaccgataaataaatactcatctccgaatgtctcactttcgggctgaaaatatctgcttgtatagacgacgttcaattcacctgtgttgttcataaattgaaccatgctgtcaggggcgacaccgtatttgtctttcatctcggccaacagctcttcacattccctgtccggctgaaacggcacgcccgattccgggtggagcggcagtattttcagacggtcttcattgaacaggaaggatgctgaagaagagatgccgggaatgttgagatagtcccgcaccagctctcccgcaccgaatttatcataatagacggcgtcgaattgaatgtcctctgcaagccgctgcacaatatgtaaaatctctagtgacgttttgatatgaacctttaaaaatgcaagtatgccggacggactgccgggatcaatgggtgtcattctgagcagatcgctgtgaagatgaactttcgcccctactccttccagtctgcttttgtatttttccgttgagatataatgaacgtgatcgccccgttcgctgaaggcctttgtcatacccaaagtcgggtttacgtgtccttctgcaggaaaattgatcatcagaatatgtttcgccatttttcaatctcctttgccttttttgtgtctcttccatatccatcataaatgacgcggaaaaaatcatgcaaggaacatccgtcaggtctttatgacggttcgatgacatcggcaaaaaaaagacaaggcatttcgccttgtctatcgtgatgattcgtctgtttcttccgctctcagcacgcctttcagatgttcttcatcatgcttgagatgctccgtcatatattgcacggcttttgttttgtcgcccttttttatttcttcaaagactttccggtgctcatgcagaataacttccgcacggtcatctcctttaaaattaagaactctgcaaaaatgaatcagcacattgacatgctcaagcagcatggccagccggctgttgcggctgaaatccacaaggagccgatgaaacgactcgtttaaggaaataatctcagtctctttgacgcctttattgacggcttcttccgtctcccgcagctgtttttcaatgaggtcaatttcactctcagccgcttcatcaataaccagttcgaccgccagtgattcaagtgacattctgattttataaatctcttcaacatccttaacggacaaagaataaatgacaaagccgtttcgatcgtctgccgtcagaagcccgtccttttcaaggagccgcatggcttctctgaccggcgaccggctgactccgaaatccttggccagctgagtctcattcagccgttcacccggtttaaaaatcccgtcaaatatcatttttttcaattgggaataaaattgcagataatacgggattggcttatctaatttaaaattatccatctttcctacctcttcatacaatttaggccttattgttaccaagatcatataacagtttatctatggaagcaacattcccgagcttgtcagcatatctgaggtgccgtaatatggaagtatagttggtcgagggtattccgtaaaccgaaaacaattcattcggaggtgacggaaacatgaagacatactagattgccagcataccgggggacggtgtggggaaagaagcagttccgcaagcggaacgggtgttgaacgcgatcgccgaattacatggaggcattgcctttgagttcacttcttttccgcggagctgcgagtattacttagagcacgggactatgatgccggatgatggatgagaaacgttacagcactttgatgctttgtttttgggagcggcggggaatcaaaatctcgttcccgatcatgtttcgctgcggggactgctcatcaagatacgccgggaatttgaacaggtgattaatgtgcggccggcgaagctcctgccgggaatcacttccccccttgttaacccgaaggattttgatctgatagtcgtccgcgaaaacagtgagggcgagtacagctctgtcggcggcagaatctatcagggtgaggacgaaatcgccatacaaaatgcggtcttttcccgacggggtacggacagagtgatctgtttaggaaccggaagcgttcggctggggttttgccaaagaaatgatacaatttttttaagagatagagagagaaaattgtatgacaaatcgcagcaggggactgcaaggaaacggtaaccactcctttaaatgtggtgaaaaaagaggatatacgtacaagacaggacgattgaagacggtctaatggcatcttcacattaaaagttacatccacaaatatgtctttacacaataaagttagagaggtaaaaaatatgaaaaaaacattttacttttttttgatattatatataattatagtattattacttaattctgtatttgacttaagtaatgtattattaactgttttgtttgctatattcgttggtgcattagtgatttatagcattgcgaaacggagtaaaggtgatgagagaaaaaagtgttaaagaaggttactaaattatttatagcggggtgtattctcgctactgtgttgtctgctttcgctccaagttctgaagcagcttgtcgacggacaaatcttgggactcagtgtgataatgatgttcttcttaaaaaaagggtaaaggtttattacacaaaaaatcaggtaaaaaaagttgtttctagatataacagcatggggtctaataaagggcttattctcggttatattattgggttggtacacccttctactggtttaagtgttttaatgtatcaagtaggagctaataatatgattaagccttttaaaactgctaattctaagaaaaagggtttagagatttcttacacggttaccgtttataagtggtcaaatgcatctactaaggtatctggagtaaaatataaatatagataagactaagtaatacataatgagcaggcgatggcctgctttttttattacaggagaaatgtgcaaaatgaaaaaggaaaactgaagtggaaatcgatctgcatgtcagggagcctgtgtgatgatgcgtttctagcgtgagtcaacggcatccggattgcagggaggattaaggagttgactcactcagtcagcattcaaacaaacttgtttcaattggcggaaacacgtcacaagcgcgacgaaatcaaacggtattgttcactcgatgccgttctgggctgacatctttaaagaggtcagccgggagtacgccgggattgagacggattcccagcacatcgatgcactggcggccttcttcgtcacgcagccggaacgctttgatgtcattgtcgcttcgaatctgttcggagatgtgctgacagatatcggcgcggcgattatgggaagcatcggaatcgctcccgcagccaacatcaatgtaaacggcaaatatccttccatgtttgagcctgttcacggctccgccccggatattgtcgggaaaggaattgccaatcctataggccaaatatggacggcgaaattaatgctcgattcattcggagaagaggaactgggtcatctcctcttacaatctattgaaacggtcacaaacagcggcattctgactcctgatgtcggcggaaaacattcaacggaagatgtcacttccgctattatttctcaaatcaagaacagataatacgaaaaaaaccgcgggcaggaaaactgcacagcggtttttttcgtctcagacgggacggatcacgcagaaacaggccgattcacctgtgaagcccgcaatacggcctgattgatccttttctacagaaaaaaaccgctgtatatcacgaggagcatccagcatctgtttttccagtaatgcggctttctcttcagtcaggcctgcccgttcacaccagacggtaaattgaaatggtttcaaaaagcagacagcggattcaatccggaagccggctgtctccagaaaacggagccattctgtttttttccacgcccgaaagtggctctgatcccgtttcttttcaatgtcattataaaaatggtcatattcatccttttcaggtgcggtattgtcaatgagaagcagtctgccgcccggtttgacaacccgaaacgcttcatgaacaaaggctctgacatcgggaaaatgatgcgctgcgattctgcatgtgacgatatcgaaagcagcatcggaaaacggcatcttttcagcatcgcctttttcgaatgacacgttcgtccatccgtttccggttataaatgcttcagcggctgctaacatttcttccgtgaggtcataggcgataacagagcgtacgagaggagcgagagcgttagccgtatgtccgcctcccgtcgcgatatccagcacgtccatatgcttttcggcaccggaggctgaaacgagatacgccaaatcctctcctgcggcgtgtcctggactagtcacatatttcgcggcgtttttggcaaattgccgctgcgcctgctgtttaattgaatcctccattatactcgggcccccttttctttctgattgctgccttaatcaaaataaacgggttcgtccggatgtttgagatacgcaaacatcttttcaatctgactttctgtattgcgggcttcagatagcggcggcagttccgtttccgcaaaaaaaccggcggcgcttgtttctgttccctccctgatccggccgccgatgatctcgcatttgataaacactttgtaaacgtgggcggcggacggcggatgggaatggcatttcttatccattacagctaacagtttaacgggctttacttcgattcccgattcctcttttacttctttgacagcggtctcgcccggagaaatcccgatatcagcccatccgcccggcagcgcccatctgccgtcgcttttctctcttaccattaatatgctctgatctttaaaaactgccgctctgatatcaactttcggagtgggatagcccgtgtcaccggcgaatacgtctttgatgatccttttgtcggtgccggtatgatgcgccatgatatccacgcttatttttcttatttcttcaaatctctcaatatcatatatgtctttggaataagccagccccgcttgcgccgcggattgaagctgttttgcccattcaagccattttggctccattttttcaccgcccgttatgttaattgacgaaaccccaagagtcaggatattgcaccttgagagtaccggtgcccatgatccgtttctgctccttgttttctgtttatggaggggcgaatcctgccggaaaaacagaaaaaagccattcatttggggactgaccccataatatgagacaaacaaaaaacaccttcaagtttgaaaacggatcgttgttatccgaaattagacttggaggtgtttttctatgagggcaagagtgagttatccggttgaagtcaaacagaaggctgtagaaatgagattggcgggcgtgcctgtgaaggagatcatgcaggaattgaatataaagaataagacgcaggtgcagacatgggtcaggtggtataaagctggggacacacatcgattcgaacaacctgtcggaaagcaatattcttatggaaaaggtccagagtattcttccgaattagagaaactgcaggcagaaaatcgttatctgagacaacagaatgaagtgttaaaaaagtacaacgaattggaaaggaagctgatagcgaaacgccagtcgagcttgtagaagcattgcgcagcacaatgaccataaaggatatctgtattcatttaggtatctcacgagcatcttattatcgttggaagaagaatctgatgaaagataaccctaaataccatttagaaaaacaaatcggcacgttgtgccgagaacacaagtatcgatatggctatcggaaaatcacagccatattaaaaaagggaatgcgtatgaatcataaaacggttcagcgcattatgcagaagaatcagtggcaatgccgggttaaggtgaaaaagcgcaagaagaatgggcagccatatgccgtggccgagaatatattggatcggaactttcagtctgatcgccctctggaaaagctagtaacggatatcacatatttgccttatgggcagaaacaattgtatctttccagtatattggatttatacaatggagaagtgattgcttttacgattggcgatagacaggacacagactttgtcttacacacacttgatcagctgcccgcactgccagagaactgtgtgttacatagtgaccaaggttctgtttatacatcttatgagtatcagaaagctgttaaaacaaaaggcattaccatgagcatgtcccgcaaagggacgcccgctgataatgcctccatcgaatcgtttcattcctcactaaagtctgaaacgttctacctcgacaggttggaaagcactacgacgaccatcgtagaacaaactgtcgaaacctatatacactattataacaacattcgtattcaaacgaaactaaacaaccagccgccggtcacataccgacagctggctgcttaaaggtgttttgatccctgtctcaaaaacgggggtcagtccctttgctgaatggctttttttcattttctatttttctttcatgacgagaacgacgcctgaaacaataagagccgccccgatccagaaggttcctccgatcgtctctcccagcagcagccagccgagcaaagtcccggaaagcggctgaaagaagaaaaacagaccgccgcttgccgcattcagtaattgcaatccgcgattccaaagcatgaacgcgcaggcggttgagatcacacccagatataaaagtccgccccatatctcaggccgggcaagctgagacaaaggaatctcccgaagcgggcccgctgtaaacggggtcaggatgacaaatgcgacgcaaatggaatacgttgtgacgacaagcggtgagtaatggccgggaacccgtttcatcagcacggacatcaaagcccatgtcagcgccgcagccagaagcgagagaccgccgagctggctcgacatattgagatctccgttccccacaatgagcaatactccgatcgtcgccagccctgtcgatattccttttttcagcgttaaccgttctttcaacatcagccgggcaaatacaaccataaatgcgggagtggatgccgtaataatcgcacccatctgcgcggttgataatttcgtgccgatttcctgcgtgacgatcgaaaccgtgttgccgatcaatccgatcgcagcgatcagtaataaatcacgtttatgaactttccaggattggcgtgtaaataaactgagaatcaaaagcgaaagaagcgccaccgcatatctcagccataccagttcaagcggcggaatgaccgctaccacaacttttacaacgacatacataccgccccagatactggcggccaatgccaaataaatcgaaccgaacaatgtatttttcaatttgatgcaccctccgttatcatattaggtcacgtcatatgccctaacggagagaagcgcagtcaccttcctccattaagggcggagaagtgctgccggtacatcatgttcaaataagggcgctagaaacatatcgtttttcacctcaattgcaatctgatttttctcattatacaaggtttgttaaaagacgtaaatgaacggcggcatcggctttatggattgcggacttgcagctggattcttgtgatctgattgtcaaacccgtccgccacaacctcatcaagcatatattcttcatatgcataatcgcccatttccagcccatactcttcagtaaactgcatgatgctgcggtaagccgcttccgcttcatcccctatttggtacccgacggcataaagccctttcggcttgatatggaggtctctattctctatgccttcttctgtcttcatataaaaatgggtgtagttgtagaattcttttttcagaatctgctcccgcgcaaacagtccgccgaccggatgcccctgatcgagttcatgtacccgcatatagcggatcaattcggaaatggcggcagtatattgccgttctggcaaatggagtacgggccgtcctatcataagtgtctcttcatctaatcgctgcaatgagacggaggaaaagtctgtctccaaggcttgttcggtcagcttcaccttcgtccgaatcatcctttgcaggtgctccagctttttgattttgctttcgatttctgaagatttctcttttaaaagcgcgatgataccctcaggggttttgtctgttaagagcggtttgatctgcttcaagggcacgccgacctccttaaacagaccgatgacctggaacagttcgaattgatgataggaatagtatctgtatccgttcgcttttttgatttccggagaaagcaggccgatctcgtcataatggaacagggtttgtttttttacgtggcacagttttgcaaattcacccgttgtgaagtattttctgacgtcttcgctcataatgcctccttgactatacggtaaccatatcctttatgatgatcattgtatccgagagaaggctgattcacaaatggcttacgcaatgaaagctttaccgtctcaaaaaaagcggaagaggagtatcaagtatgacgattgaaatcagaacagtcacggaagaaaaccgtgccgatatactggcgcttcatgtaagtgaaagccagacttcatttattgaaaccgcggaagagtgcttacaagatgctgaggattgccggcattatcagccggccggtctttatgttaacggggaattggtcggctttgccatgtacggatggtttccggaatatgatgaggaaaatgaaaacggcagagtgtggcttgaccgtttttttattgatgaacgctatcagggacggggattgggcaagctgttgcttgatgccctaatccgtcatctcactcaaatatatgattgcagacggatttatttaagcctgtttgaagataatgtgcacgcattgcggctttatcaaaaattcggcttcttattcaatggagagctggactcaaacggggaaaaagtgatggtgaaagagctgtaaaccctctgtataaaagcaattcggcttcttgccaataccttaaatttgaggtaacataaagatattagacgacggtcgacggactacggtcgattattaaaacctgatacagcggagcggaacatggtgatcaggcatctaaatggaggagaagattgtgcttattatactcgttatgtttcttctcgggattattctcgggtttatcggcgccgggggagccggttttgtcattgcacttttaactatactgtttcacgtaccgattcatacggctttaggcacctcccttgccggaatggctttcacaagtttatcgggggcattcagccactaccgtgaaggcaatattcagatgaaaatcggcctcatcgtcggcgtttttgcggcattcggttcgtttttcggggcaaggcttacttcccttatccccgcagatttgctgcattacttgacggcgggcatgctgtttttatctgctctgcttattttagtccggttatttattgtaaaagaaacacaagaagattccggacggcaaagcaatctgaatatatgggtgaaagccgttgtactcggtgtcatcgcaggaatcttgtccggaacgttcgggatcggctctgcccctttcatccaaatcggcttaatgattcttttgcgcttatccatccgccagtcggtcggcaccaccatgcttgtcattatcccgcttgcggtcggcggaggactcggttatgtgacggaaggatttgtcgattatatgctgttggtcaaagtgctgatcggaacgatgtgcggcgcatatgtcggagcgaaattcaccaacctcgtgccgaaagtcattctgaaatcagccatctttttaacaccggccatcgccggtctcatgcttttattttaaactgaaacgggaggcggccgcctcccgttttgttctgttcttcatctgttttcgaagagctttttcagctttgcttccgtttcggtatgatctaccggcgtatacacactgcaacgcagatcactgttgccctgaacctgaaatgaagtcaggttaaagaccatttttcccgccttcgcgtggcggaactcaattaatacttcgggtgccgagctgacttcgctctcattccacagcgtatgaaattccgaatacgttttctccatttcttctataaactgagaataccacgtatcagctacatactggccgtaatacgttctgaaaatggcgatgaatcctttcacaaagtgctcccagttcacggctaaacttcttaattcttttctggaaaacaaaagctctatgagattccgtttttcaggaggaatttgttcaaaatctaaaaatacgtgagccgcggcctggttccatcccacgatatgacaccgcctgtccgagataatggtgggacaataacggagctcctgcaggatttttgaaagggacgggctgataaccgcttcttcctccgcagcaaacggctgcttcacgccctcctcaatggcaagggcgtataaataatttctctcatctttgttcagctgcaacgcatcggaaacggcgtccaatacggctgcggacactttaatgtctctgccctgctccagccacgtataccacgtggtgcttacgccggctaattgcgcgacctcttctcttcggagtccgggcgttcttctccttgtgcccatcggcagcccggccatctgcggagaaattttggcccgctgcgtttttaaaaactctgagagcgcctgcaatcttccttctggtatcataccgaatctctcctctcttaccctggtatttattatactaggataatcaacaacttgtaataggataattgcgagttaaaataaatacataccgaaggaggaatgaccatgaaaagagttgtgatcaccggaatgggagtgatttcacctctcggcaatgatgtgcatacattttggaaacacctgacggaaggaaaatcgggaatctctttcatcgattcgtttgatgtctccggctccaagacaaaaatagccggcaccgtccgtgattttgacgcagaagaaagatggggcagaaaagaagcgagacggcttgaccgtttcagccagtttgctttagcggcagcggaacaggcgcttgaaagctccgggattcagctcgatcagattgaccgtgaacgcctcggcgtgtacgtcggctcgggaatcggcggcatcacgactttgattgataacgttcatactttaaatgaacggggagcgcgaaaagtgagcccaagccttgtccccatgatgatctcaaatgcggccgccgctcaaatcagcatcagattaggcgcgctcggcccctcactttctcccgtcaccgcgtgttccatcggcaatacgtcgatcggggaagcattcaacgccattcggaatgatgacgcagatatcatgtttgccgggggagcggaagcggcgattacgaatttgtcattagccagcttcggcaatgcccacgcgctgtcagcgagaaacgaagaccccgccgcggcaagccggccgtttgacgcggatcgcgatggatttgtcatgagtgaaggcgcgggcatcttagtattggaatcattggatagcgcaatcggcagaaatgccccgatcctttgtgaggtgctcggctacggtgcgagctctgacgcctatcatatggtggcctcccatccggagggaacgggcgcatacctggcgatgaaaaacgctttgaaaaaggcgaatgtttcagcggaagacattgatgtcgtaagcgcccatgcgacaagcacaaaagccggagatctttctgaaacattggccatcaagacattattcggggagcttgcgtatgatattccggttacggccaacaaatcaatgctcggccacatgcttggcgcggcaggcggcgttgaggccatcgctctgacagaaagcctgagacacggcatcatcccgccgacgatcaatctgcagcaccctgattcggcatgtgatttggactatgtagcagacgggccccgccatcaatcgttaacgatcggcctttccaactcattcggctttggcgggcataattcggcgatcgtgctgaagaaatatgaataacgggcatcaaaaaaaggagtgaatcatttcactccttttttgctttctccggttttgttgttaaggcgaaaaaagcgatggaaccgataacggatgtcgtgaacataattgcccccatcgggacggccgtcgcttcattcatccccacaagcggcgacacgatggaaccgagaagaagcggaagcatgccaagcagtgcgcttgcgcttcccgcgcggtgtccctgcttttccatcgccaatgtaaaggtgcttgtcagcgtcatgccgatcgtaatcatataaataaaaattgaaatcaccagtgccgccagcggtccgtgaatgatcgtcatgacgagcagaacggcagtcgccgtcatcgctgtaatcacgccgattctcaacaggcttttttcgtgaatgattccgccgaaacgcccgatgataaagcttccggtaatgatcgccagaccgtttatgccgaataaaacactgaatacctgaggcgatactccgtaaatatcctgatacacgaaaggcgttccggagacatacgcaaagctcccgccgtgaataaaaccgaccgtcagcgcataaccgataaatgaccgatccttcagcaggcttcccattgtccgcacggaatttccgatggagctcggaatccgcttttccggcggcagggtttctgtcagcttgagcgcaatgataagaacaagcaaaaacccgataaaggttaaaaagagaaaaatcgtatgccatgatgcaaacggaagcagtaaaatcgcgcctcccgtcatcggcgccaccatcggcgcgacggcggtaatgaccatcagcagcgagaaaaatttagaaagctctcttcccgaaaacacatctctgacgattgcacgggataaaacgagtcctgccgaagcggtgaatccttgaagaaaacgggcaatcactaatgtagtaatgttcggtgcaagtgcgcaaaacagagaaaacaacgcaaataaaaaaatacatagtaataacggttttcttcttcccttcgcgtcacttaacgggccgacaacaacctgtccgattgtcagtccgatcagacatgcggttaaactgagctggacaagcgatgcgcgggcgcttaaatcttcagcgatttcagggaaactcggcagatacatatctatattgagcggccccagtatcgcaagcattccgagaagaaaagccagcgcaagccgctccttaccggtcggattatgcaacatatcgttcccacctttcctttgtcaatctctcaaaacatttgtatattgtatcataattttttctttatttttaaaagttttcaaagggcataaaaaaaccaagggctgtaacagcccttgggtccgggtcacgcggtaaaaggttttacgcgtgtttttctttaaatgcttttgcgtattgatcagccgctataatggcatccgccacgtcgtcagccgtaacgtcaaaagcagcatgaattgtttcttcttcaatcgtcgcggcttctgccactttcataatgtcctctttagatgcgtctttcaatttgatgtcttcaagtgtgacaggcagccccaagctgatataaaacgcgatataccgctcaatttcctcaagcgaacgtttttccagcgccaattgaacgagcgtgccgaatgccactttttcaccgtgggtcaagtgatggatttcaccttcaagcgcggtaaatccgttatgaatggcatgtgccgcagctaagccgccgctttcaaatcccagtccgctcagaagtgtattggcttcaaccaccgcttccaatgcgggcgtaacggctttcgctttcacagactcataagcgagacggccgtatttgaataataccgcttcacatttttccgcgatagcctctccggcgattgtcggaattccgcctgccatcgttttaccgccattggcgatgacactgcgcgcctctatccacgtcgccattgcatcggcaatccctgatgctaaaaagcgcggcggggcttccgcgacgattttcgtatcgaccagaaccagatcaggattcttatgatagaaacgatagttttcgaacgcgccttgttcagaatacacgacagacagcccgcttgtcggagcatccgttgaagcggccgtcggcacgataacggtatagccgtttatttcatctgatacggctttggccgtatcaagcgttttaccgccgccgactccgatgacaatagtcgcgcctgctttttctgcgatgccggcaattcttttcatttcttcctgggaggcttcgccgttgaaaaccgcctcttcagaagagatattgcttttctttaattcagccgtcaccttgtggcccgcgatatcccatacggttttgtccgcgatgacgacggctttttcaccaacgccctccagatgtccgccgatcgtttcaatggcgttttttccctgcacgtatttggccggactgataaaaattcgttccaatgtcatcatcccttcttcgttgtctctcattacatttctcttattgatagagcagaaatgaaaactcttctgatatcattcctcgttttaaattgatttaaacctcatatacactgcagaaaaatcaattttcacggcattgacaagatgtgaaggtgtctatataatcttcgatattgaagctgatcattctttactgaatgaacaaacgagattgtgaatgattcgtcttaaaaattatttagttctgctggataatttttgaggcgtttttgttttttatatatttttgactgcagaggaggtttgcacatgaagaacatttgcaaggatatactgatgattatggccggagcctttcttattgcggcgtccgtggaatttttcgtcatcccgaatcatttaggggacggcagcaccgtgggaatcgctctcgtgttatattatcttttccatatacctgcaagtattacgactctggttgtaaatttgatttttatcgggctggcttataaatttttaacgaaaaaaacgattttatacacgatactcggtacgggaatgacttctgtttttctcagcatcgtcagctttattccgttcggcgtgcacgatatggtgctcgggattgtattcggcgctctgctgatgggagcggggctggcattgatctttattgctgacggatctaccggcgggaccacgctgttggcgtatttattaaattacacaaagggctttaacatctccaaaagcatgttttatatggattgtgtcatcattttcgcatccgttttagcgatcggcatcaatcatatgctgtatacgtttatattcgtatatctgtgcgccaaaatcgtcgatattgtcattgagggtttccataataaaaaagctctcaccattatgtctgaccaatacgaagaaatcgccaaagccatcacctccgagtacggcaacgcggcgacgattttttacggatacggctattacggcagcaaagacaagcgcattatctatgttgtcattaaaaagaacgaattgctgaaaatcaaaaaacatgttcaaaaaattgatccgaaatcatttatcgttattcatgaagtaaaagaagctgtcggagggcaattcgggtttacaaacctgcccgccgccgcaaatgaaaaataaccgcctgcagtgtatagctgcaggctttttttattcggctcttccccgctcaaaggttttttacatctttcaatcgaagtagtaaatgaaaccttttttgatggaggaacataaaaaatgaatatcaaaactgaaaggctcgtaattcggacgtttgaaccggaagattggcaggatgtctatgcgtacacctcaaatccaaatgtcatgaaatatataccagagggtgcctttactgaagaagatgccaggaaattcgttactgaaaacagcggtgaacatgccgggaagtttcccgttttattgaaggatgagaaaacggtcattggccacattgctttttttcagtattttggcgatcatacgtatgaaatcggctgggtgtttcacccggaataccagggcaaaggatatgcttcagaggcggcgcgcgccgtgctggcattcgggtttaacaagatgaaattacaccggatcattgcgacatgtcagccggaaaacatggcttcgcaccgggtgatggaaaagatcgggatgagacgggaaggattttttaaaaaatgcatcccccatgataatgaatggtgggacgaatattattatgccgttttagaagaagagtgggaagtctccaatctggaataaaaaggcttataccctttgcttttacagataagtgtgtgctacactgtttgtaacaaatacgaagggatgatgggtggacaatgattaactaatcttattttgaccgtttgaaatcaaatatttcaaatcagaaaaaataggattagtctgcccattttctatacgatacgaaagctatgtgaaaatagcttatttgatcatgcacaggtacggctaatccttccaaatcaattgggaggatttttttggtcctccctttaaagcgagggattgacatatgaaagaaatgttaaaaataagcggcatcagttatgaaatcaacagcgttcccctttttgaacaaatcagcgcgagcgttcagcaaggtgacatcatcggcgttatcggtaaaaacggcgccggcaaatcgttattgctgcaattgatctgcaatcaaaaagcgccggcacaaggacagatccagatgatgcaagatgtgaacatatatatggtggaacaagaaacggaagcttatgattccggccatccggagcctgcggaggcagccttgttagaaaagtggaacgtgcccgcacgcgccttttcgcaattgagcggcggagaaaaattgaaagcccgtcttgccaaaggtttctcctcctcaagcagccttttgttattagatgagccgacgaaccacctcgatcagcacagtttagaaatactgctaaatcagatcaagaattacaaaggcaccattatttttgtttcgcatgatcgtgcttttatagatgcagcggcgacaaaaatctgggccatcgaaggaaagaaactcattgaacataaagggaattattcaagctatatggaggtccgaaaacagagaaggctgacacagcagcgggaatatgagaatcagcagcatatgatcagacggattgaagctcaaatgaacgagctgagcgcctggtcaaaaaaagcccacgcccaatcaacgaaaatagaaggctttaaagaataccatcgcgtcaaagcaaaacgcacggacgcccagattaaatcaaagcagaagcgtcttgaaaaagagcttgaaaaagcgaaagcagaaccggttgaagcggagtatgaagtccgtttttccattgagcaccgcaaaaaagcgggaaagcgttttttagaagtaagggatgccgcaaagtcatatgacggacgaacgcttttcaaaaacgtgaatttcactgtgatgcacggtgaaaagatcgcgattacaggcccgaacggcagcgggaaaacaacattattgaaggtcatcctcggtcaggaaaaagcacaggacggcagcatatggatatctccgtctgcaaacgtcggatatttaacgcaggaagtattcgacctcccgcttgataaaacccccgaacagcttttttacaaagaaacgttcgaagcaaggggaaatgttcaatccctcatgaagcatttaggatttaccgcagcgcaatggacggaacccatcggcaagatgagcatgggagagcgggtcaaatgcaaactgatggcgtttattctggaggagaaagatgtgctgattctggatgagccgacaaaccaccttgatctgccgtcacgcgagcagcttgaagacactttggcccgatacgacggaacgctcatcatcgtatctcatgatcgttactttgtcgaaaagacgacggacatccggcttgatatctcaaacggcagcgtccgaaaacaatggaaagaatctccctccgtcagggacgatgctgaagaactgcgattaaagcttgagaccgaacggcaggaagtcctcggaaaactcagcttcatgactccggctgataaacaatatcgtgagcttgatcaaaaattcaaagagctgacggaagaaatcaagaaattgaaatgaatgaaaaacccgtgattgtcacgggttttgttttggaaagctcacgtatcatgaagaataatttcaaactgatttgtacaacctacgttcagattaattatgagcatggttcaggggggcgaagaatggccaaacgcatcggaattacgggaaacattatggctgatcaatccggccctttcccgggttataatcgggcatatgtcaataatgattatattcagtctgtttctgaggccggcggtgtgccgtttatattgccggtgattcaagagacggcgcttttaaaggaacaggtctctcatgttgacgggatcattctgtccggcggtcaggatatagacccgctgttttacggtgaagaacctttacaggctttaagaaagacctttcctgatcgggacgcctacgagaaggagctgattctcacggcggttgctttagaaaagccgattctggccatctgccgggggatgcatatgttaaacgtcacttacgggggaactttatatcaagacctgacacacgcttcgtttgctgacattaagcatgatcaagaaaaagatccgccgctaaaaacccatcatgtttcttttgaaaaagggacacgtctccataccttgtttggcgattcagcgcgggtgaattcattccatcaccagatcataaaagagacggcgccttcgtttaaagcctcggcttatgcgaaagacggggccattgaagcaattgaacggacgggtgaattatttgtcgtcggcgtgcaatggcatcccgaaatgctgacaaaaaaacatgaagacatgaaaaagcttttttctcttttcatggatgcggtcagcacataaaaaaagcagatcataacgatctgctttttcattttattcttccggtttctccggtgttttgccttgtgtcagcttatggccttcgatatccacgttcggaatgattttatccagccacttcggcaagtaccaggccgcatgtcccatcagcttcatgacactcggaataatggtcattcttacaatgaacgcatcaaaaagtacaccgaaggtcattgccaagcccatggatttgatcgtagcttctcccgcaaagatgaatcccgcaaagacgaaaatcatgatcagtcccgccgctgttacgacaggtccgctatgtttcaatccggcatgaatggcttgtaccggattttttgttttgacatattcttctctcattctgctgacaaggaatacttgataatccatcgccagcccgaaaagaataccgattgctaaaataggcaggaaggcaagaatcgggcctttttccggaatgctcagcaagccggtgaaatgtccatcctgcaggacgaataccgataacccgagtgttgcggtcattgtcagcaaaaagccgacaacggcggcaagcggcacgagaagcgagcggaaaacaacggtcagcaatacaaacgcaaacccgacaatgagaatggcgaattccgggatcgcatcgtttaaccggtctgaaatatcaatgttcaccgcggttgacccggtgacgagcaggcggatgccgtttttgtctgatcgtttccgtatatcctgcactaactctttcgttgccttatcattcggcccggtttcaggcactgccgtaatgatggcatagtcccctttttcgttcggcatggcaggtgtgacgctcgccacattgtgcaagtccttcatttctttcacggcgtcttgaaatgcctcacttttgttccccttgaccccttttgcatcggcaacaattgtcagcttgccgttaaagccttctccgaatcctttagacaacagatcataggcgcggcgatccgggctgtctttcgctttcattcccgcatcaggcagccccagctctaaatgcatggccggcagactgatgacggctaaaagaatgatgctgaaaatgcttaacagaataggcttctttgtaacgaagcgcccccaggcattcgtgtcggcgcttttcttttctttcttcttgtatgatttcggaatcatccgttttcctgcgattgacaacaccgcaggcaccagcgttactgaagccaatacagccatcagcacactgagtgccgcagtcaatcccatggcagacatgaacggaatgccgacaacagtcaatccgcaaagcgcgacgatcacggtcagtcccgcaaaaacgacggcgctgcctgccgttcccgcggctttcgcgatcgattcatttttttgtacaccttcgcccaaaaactgacgatgcttcgtaaagataaacagcgcataatcaattccgacggccagtccgatcattccggataatgagagactgaccgaggctatcgtaaagaactgtgtcccaattaacgtcagcgcgacgcttacacctaacccgatcagggccgtgacaatcggcagccccgcgatgactaatgaaccaaacgtaatggccagaacgacgaatgccagcacaacgccgacaatttcagatacaccgccgatctcaacaccggcccccggcacatcgccgctgagctccgtctgcagacccttgtctcctgcggcggacagactgtgtttaatatgtgaaacagacgcatccgtaatgtcatccgccgcttttttgtacgtaatatcggcatatgccactgatccgtctttagaaatggttcctgtctcaaaaggacttgcaatcgaagcgactgaatgatctgttttgatcttctttaatgtctcttcaatcgcttgtttttccggttttgacgtcaatttcttcccgtcttcagctccgaaaataacccgtatgcttcctttatcgggaccctttgaaaattctttttgaatgatatccatcgccttttcagaaggtgtgtcgggaattgacatatcctcagaaaaagcaggttttaacgagatggcgatcacaatcgaagcgatcagtatcacgagccacgcactgatcatttttaatcggttgcgggcagaccatccacctaatttatataaaaaaccagacatcgaatactcctctccaatcattactttctgcctaattgtagttcacattcacataaaaaaaacgtacataggggcatgtacgtttgggcagtttttcattatatattcagtttcagaatgcctttttgcatggcaatggtgacggcttccgtccgcgaatcagcgcctaatttgttataaatcgatgttaatctcgcttttaccgtccgctctgagattcctaaatcgaaggcgatcgctttgcttttatgtccttgcgcaacggcttgcagaactatgatttccttgtccgtcagctgtgtttcattggcatttgcccgttccattttcatttcccggaaacgccgcaagatatccggctgcagaagcacttctcccctgaccgccgcatccatcgtatgaaataaggtttctgagcttgtgtctttcagcagataaccgttcgcgcctgattcaatgccttctatcatcagatgatcttcattataggtcgtcaaaataatgatcggcacatcagattgctcttttatctgtttaatggcttccagcccgctcatttccggcatgtacagatccatgagaatgacatcgggctttagttcctctgcgaggcggacggcggttttcccgttttccgcctctcccgttatggtgtaatggtcatttgtttctatcaaaagcttcagaccttctctgacgacaagatggtcatctgctattaacactttatacatgttccgcctctccttgaattggtatgatgatctcaatttgagttcccgctgatttggcgcttgttatacggcaagtgccgttcatcatattgacgcgttcttgtatcccaagcagcccgtaatgtccgctttttctcatttctgttccggcatcaaagcctttcccgtcatctttgacggttatgcggatctgtccctcttcttcttgaacggatacccagacattctttgcttctgcatgcttggcggcgtttgtcaggccttctccgatcatgtaatggcaattctccgccgtatgaacgtcaagcacatgatgcacgctgtaatctaaaaaacaagacagcccggaggcttctgtaaaatggttgatttgttcagtgatgctttcttttaagaacccgatcttttctgatgtgctgcgaaggttgtcaatggccgagcgcgcatcagccaatgtgcctttcactctgtccattgactggctgatgatgtctttcgctctgtcagtgttaccctttgaaagatgaacatgcaccgcttcaagctgcatatgcaagctgaccaatccttgagcaagcgtatcgtgcaagtctctcgccatccgctgtctttcattctgaagcgtcagctgtttcacttgccggtgagcgagctctaatttttcaagcgtcatctgtgtttttattttttcatcaacttgcgcgaaaaatgtggccgcatacgtgataatcacgatcatgatgggagcggcgataacgatgaaacgtagcagatgatgcggatgctcctggtgcagggctgttatggacattaaaatgaaaagatagagtatgagcagcgtttttcccttatccgccattccgataatctgcccgattaaaaaggcatagagaccgacgacaaccgcgatatagccgccggtcatcaagttagccgatgtatatatgataaatccctgtatgatgaaataaagaaacgtctttttcttcacccagcgatgggaatgccagtgcagcacggtaaaaatgacgatcaatatcgtgaataacagcagcaaaaaaaccgtccagctttcataaatgtactgcaaagagactgatgcggcatataccataaaaataaacgccagaccgggcacccgaagcgcaagcatatgcaatgagcgtctgtcacgggagacatagtcttcttgatgttttgtaccaaacaatctctgtccacttccttttagccgaccggcctcacgaggttttattctatttgtcatcataccataagtgcctgcttctcaccttccccttctttcctgcatgacgggtgaaagaaaaaacagcctgcgggattgttcgcaagctgcttttttgtttatatcttttttatgacctttcccgggtttcagcgggctcgtctcccgcgcggcaaaaccgcccacgcatcagaaaaatgttcatgacaccaacagccattccatgtgaacaagaggaagcgattgtgcttcctcttttttttgatgcaccgtcaggctttttctcagctttttctgataaacaaaatttgtaagactagacctcttttctcaggggaaattaactacgtatttctacaagggaggtttcagacgattatggataagcgtgaattagcggctcacgagtcgctggaattacatgaaatcattaacttcaagacgctttgtgtcgcgaaatccaagctcatgcaaggccttgtgtttgatcaggatctgaaaacgttaatggaaaaagacgttcagcaagcctctcaagaccttgctgatctgcaggcggtttatgaacgggcaacgtttcaggctcccgttcctcaaaaccggccgacttcgatcatcaattgaaaggaaggtaagcatcattgaatcatgaccatttagatccgatcaattcattacatgtccctgaacttgcggacatgacattcgcaatggattttctcatacgcgccaaagaaggcgtcagaaataccgccgttgctttaacagaaaccgcttcacctgatgtaagagctttgctgcgcaaacagctcatgcagggaatcgcgatgcatcaggagataacagacttgatggtcagcaaaaagtggtttcacccgcatgatctgagcgaacagtataaattggatcagctctctgcgaaaaataccctcatggtcggaaatatgaatctgtttcccgttgaaacaaacagaaaagggatgtttgaccgcacacctgatgaacactaacactggaggtattacagcatgaaggccgtaacgtatcaaggagtgaaaaacgtcgttgtcaaagacgtgcctgatccgaagattgaaaaacacgatgacatgattataaaagtcacaagtacggcaatttgcggatcagatttacatttaatccacggactcatcccgaatttgcaggaagactacatcatcggccatgaaccgatgggcatcgtggaagaaaccggtcccggcgtgacgaaagtcaaaaaaggcgaccgcgtcattattccttttaatatcgcctgcggagaatgcgtttattgtaaaaatcacctggaaagccaatgtgatcaatcaaatgagaacggcgatataggcgcttatttcggctattcaggaaatgccggcggctatccgggaggccaggcggagtatttgcgcgttccatttgcgaactttacccattttaaagttcccgaaacatgcgaagaaccggatgagaaactgagtgttatttccgatgcgatgacaaccggcttttggagcgttgacaatgccggcgtaaaagaaggcgatacagttatcgttctcggctgcgggcccgtgggccttttcgctcaaaaattctgctggttaaagggagcgaaacgcgtaatagccgtagactatgtcaactaccgtctccagcatgcgaaacggacgaataaagtggaactcgtgaacttcgaagaccacgaaaatacgggcagctacctgaaggaaatcaccaaaggcggcgccgacgttgtcattgacgccgtcggcatggacgggaaaatgacagaccttgagttcctcgccagcggattaaaacttcagggcggggcgatgagcgcattggtcatcgcgtcccaagcggtgcgaaaaggcggaacgatccagattacgggcgtgtacggcggcagatataacggttttcctcttggcgatatcatgcagcgaaacgtcaatatccgatcaggacaagctccggttatccattatatgccgtatatgtttgaactggtgtcaaccggcaaaattgatccgggcgatgttgtaagccatgtcattccgcttagtgaagcgaagcacggctatgagatgtttgacacgaaaacagatgattgcataaaagttgtactcaaaccttagagaacggaggctacagaaatggccagcgccttacatgaattactcgaaattcaggagatggcttcttttaagtcactttgtctgacgaaatccaaaaccatgaaagcgctcgtatccgatccgcagctgaaagaaatcatgcagcaggatgcggatacatcaacaaggcaattgcaggagtttgcctcgattttatctgatgcacagcatgaatgaggagatgaatgacgaatgaatccgattattgaatacttgacgggaataaatgcactgacagaccaaattgtcgcaatggatttattgaattcggcaaaaagcggtgtcagaaactatgcgatggcggcgacggaagccggaacgcctgaagtgaaagcgatcctcaccaggcacttagaagaagcccttgacatgcacgagcaaatctcacgctatatgatggaaaaaggctggtatcacccgtggaacacaaatgaacaagtccggctcaatttgcaaaatattgatacggcgctccgcctgcccgtcctataaatcgttttgctgctgagactgcacccctgactcaagcttcagtattttaaactgtgagctgccttttacagcgcccaggcggctctcagtttttttatgccttcttgtatatcggtttcagaaacccccgcgaaaccgagagaaactgttttttcagggagctgtttttgataggtgagagacacgggatagattttgacgccttgttcctccgccttttcaatcagctctttttcgctgaaaggcagctgaacgtcaagtaaaatccgcagcccggaattttctccgcgaatcctgacgtattgtcccagctcgcgccgcacggcctctaataataccgctctttttttccggtacagctttctcattctgttaatatgtttctgccactctccgcttttgataaattgagccagcgtcagctgactgtggcaggagacggtctgtttatataaagaagcgatttccctgcctttttcgataagcggcaaaggaagaatcatatagctgatgcgcagcgaaggaagcagagattgggaaaacgtccccatataaatgacacggtgatgctgatcaagcccctgcaatgatgggatcggctggccggtgtatcggaattcaccgtcataatcatcttctataatgaacgattgatgttccgccgcccatttcagcagctgaatccttctgtttaccggcataatcgttcctaatgtaaattgatgagaaggcgtgacatatacaagacgcggccgctcttcattcagcttccggatacagactccttcatcatcgacgggtatcggaatgatcttcatgtgattggctttaaaaatctccctcgctctcggataacccggatcttcatatccgatggatagatttgcttcaaatattttgcacagcatttgcaaaagagcagggttcccggcgccgactatcacttgttcaggacggcaattcaccccgcgcgactgatataagtactccgaaatgagcgttctcaattcaagctcgcccaaatcatccccgggccgatacagctcatgcccgtattgatctaagcttgcaaccatacttttgcgccatgctgaaaacggaaaatgagcggcatccacagtgccgtagtgaaaatcaatccattggcggtcttccttcgcctttgtttgaacaggcgaagcgcccggctttttcacatagacggcgtccgagtcataatcggcaaaccatccgcttctcggcttactgacaatatagccttcggcggcaagctgttcataggcccgctccacagtcgtctgactgatggaaagctgacttgacaaaagcctttttgaaggaagcttcagtcctttaggaagacggccctgatgcatattttccttaaaatgccgataaagctgctgataaagcggaatattcagatctctatttaaaaatggcgtgatatccatttttactccctccaaactggcattcttctttttataaaaactggccatttgtataagaccaatttcagtttatagtcattataaactttgaaaatgggtttagaaatatatattggagtgattggaatgaagaaagccgcaaacggctggattaacggatttatcggcgtgctcattttcagcggctcgcttcctgcgacccgcttggctgtagcggactttgacccggtatttctcaccgtatgccgcgccgcgatagccggtatattggcaggcgctctgctcctcatttttcaggagaaacgccctgccaaaagcgacatcatttcactaataacagtagcgctcggcgtcgtgatcggtttcccgctgcttacagccttagcgcttcagcatgtcacatccgctcatgccattgtctacatcgggcttctcccgcttgcgacggcgatcttcggcgtactgcgaggaggcgaacggcccaggccggtcttttggattttctcggctgccggcagcatcctcgtagccggatatgctctgctgcaaggaggagaatcctctccgctcggtgatacgtacatgatcgcttcgattatcgtgtgcggtctcggttatgccgaaggcgcccgcctctcccggcggcttggcaactggcaggtgatctcttgggcactcgttttatcgcttccccttatgttcatcctgtctttctgcttcatgccggactcatggtcaaacatcggcgcgcccgcactgctcagtcttgcatatgtctcaatattcagcatgctgatcggcttcgtattctggtatcgcggactcgcccagggaggcatcgccgcggtcggacagctgcagcttctgcagcctttcttcggactgttactggccgccatgattctccatgaaaaagcaggatgggaacttgcggcggtgaatgccggcgttatcgcttgcgtggcggccgcccggcagttcgcaaatcaatcagaaaagaccgaacaatgaacttgttcggccttttcattatattccgcccgtaggcagcagaagtctgtatctctttcacatgatccggctatttttcaggcaggctgaactcccttaaacgcactcatcaccagatcatgcacataggaatcattcacctcatcacctgtaataagcagacgatagaaaatcggtccgtaaatgagatcgatgcttacgtcaatatcaagattctctcttaattcacctttttgaattcccttttccagaaggcctttcgcttggaggcgtcggggctggaaaaatcgagcgcgatattcttccgccaattttgcatccagctgccccgcaccgattaattccttaataacggttccttcccggctcgtcaaaaatcttgctaaattcgtggcgtgggtcaatatatcttgcactgttgatcctgtatctggcacaggcagtctgtccgtagcggtcgaaagaaagctgtccatgataacggcagccttgtttgaccaccatttataaatcgttgccttacttactttggcacgctcagcaattttatcgactgtcaccgcgtcaaagccattttccaacaatagatcataggctgcagaaagaatcgccttatgtgttccttcatcgcgcggccgtcctcgtttactctgcacatgaatcattccttcccgaattataaacgatacgttcagtatacttaacctgtataaaaaaagaaaacagaaacctatttacaaaactgaacgtttagtatatcattttcttataataaaactaaacgtttagtttataaaataacttgagggaaatcttgatgaaacatagactcccaaagcctctgcgtaaaggagatgaatcagcaaatcatttatcaaagcatcataaaaaccacttaaaaaggagttcattcatatggctaaagaaaacaaacaaacagcagctcagggaatttcacctggtttaacccttcttctcgcaacggcatgcggtatcattgtcgctaatctttattatgcacagcccttggcaggattcattagtgcggcaatcgggctttctccaagcagcgccggattgattgtcacactgactcaaatcggatacgttgccggcttactgtttctcgtccctttgggagacattatcgaaaacaaaaaacttgtcgttgtatcgctccttctaagcgcagccgctttgacactgacagcatttgcgaagcatggaacactgtttttagccgctgcgtttttcatcggactgggatcaattgcagcccaagtgctagttccgttcgcatcataccttgcaccggacgccgcacgcggccgggttgtcggcaatgtgatgagcggcctgctgctcggtattatgctttcccgtccgatatccagtctggtcgctgatatatgggggtggaatgccatatttgctttatccgccgcgttaagtgttgtcctggcaatcgtcttatcaaaagtgcttcctgccagaaaaccaacagcaaacacaagctacaccgtcttactcggttcaatgtggaagctgctgcgcacgactccggtcttacgccgccgtgccatttatcatgcgtttgtatttggcgctttcagcttgttctggacgactgtacctttattattgtccggtcctgcttttcatttttctcaaaaggcaatcgcgctgtatgcattagcgggcattgcaggtgcagcggctgcaccgataggcggccgtctggctgatcgcggcttgacccggcttgccaccggaatcgctctcggtgctgtcatcgtttctttattactcccgctcatgattcaaagcagctctcacgtcggcatagcagttctggtggccgcagctatcctgttggatatgggtgtatctgccaatctcgtactcagtcagcgtgccattttttcgttggcacctgaatttcgcagccgattaaacggattatttatggccatcttctttctgggcggtgctataggatcatcaatcggaggatgggcatacgcctcaggcgggtggagtatcacattatggattggaatcgcttttccggtcatcgcattgctttatttcaccacggagaaataagcctttcaccaaaaataagccgtcaggaccaagctgacagctttttttggggtgtattcttctttacatccatccgaacaaaaaatcccgattcatgaaaagatgatattgattctttacgccccgctcatatagacgggcgcgtgcccgctgccgattctttcagcagcggtaaaaccatgtcataatatgttaagaaataattgcgccataagcaggtgaacacatgaagaagtatttatataaacaccttttgttagctctcgtttcgtccgtttgctttttattggtcttttatgtgggtttaaaaatgacacaggaagacacaccgccgttgtcttcttacccgttttacctttttatttatctttacatcgcagccggatatttgacggtcggccttgttttagcttgtatgactgatatcttgaagaaccgctggacattcaataaaccgtctaccattctattgaaacttatcgtttacttattcataccgtatgctatttttcattctttcttcattttaatggcgccgttgatttatgtgctgtttgagtcgttattcatcctgagaaaagcttcataacctgcaaaaacataccgcatgctgccggtatgtttttaacatgcttgtcagttgttcgcagtgatccgtttgatgttttcttccatcaagccggaaatgagctgttcgtttgtatgaggaatctgtttgagctgttgtacgaccagcccttgtcttgcagctgaatgattttgactcagctttgctttcccctctattttgctgattttgattttaaagccttttacccctttgttcatgcctgccagcactttcgcatcgacatcctctaatttgtacgggctgtcggggctttcgtatttcaatacgagatcactcatcgactgcacggtttcttcctcatccaaaagctccgtctctccgtaaacatgaaccgccacataattccatgtgggaacagcctgattcgtctcataccatttaggcgagatataacaatgaggcccttgaaaaacggctaacacgttttggccatcaatctctttccattgggggttcggcaatgcaaaatgaccgtataagcattcgttatccttactcatcatcaatggcaggtgggttgcatacggcatgcctcccgccgttgaaaacaatgctgcgaaaccatactctttgatgacatcgcacgcttcagcttcactcagctgaaatggagccggaatatacatacaaaactctcctctcgaacatggattgataaagcgctttccgctataataagatatcaactgacatttaaaaaggtacagtttcaaataaatacacatgtcagaggagaacatctgatgaaaaatatgattttcgctttcgaaagcgacaccccgaaatacaaacaaatttacgagcaatttaaaacattgattgagcagggaaatattcaggcagatgagcggctgccttcgattcgggagctggcagattccctgcgggtaagccgtaatacaacgctgatggcttatgatcttcttttagcggagggatacattcgcggagaaacacgcaaaggttattttgcaaatgaagtagaaccttctttatttcaaaaagaaaacgatgttgtccacgctgagaaaaccgaatcaactcagccggccctgattgattttcgcgccggagccgtcgatcaaaagcattttcctctgaaaacatggagaaaattatacaatcaagttttgacatcagagaaaagcttcctgtacggcgaaccgttcggcgagagagacctgcgtgaacaaattgccgcttatctcttggaatcccgcggagtgaaaacagatgcggattccattatcatcggcagcagcacgcagcagatgctgatatatctcagccggattctgaaagaggatttttcgggaatgatcgttgaagacccgggatttgacggtgccagagcggcatttcaatttcacgggctatctctggaaacgatgcctgtctatgaaaacggagctgatttttctcaattacatgcaatgaaagaaaaattaatctatgtgaccccatcccatcacagcccttacggcgtaagcatgtccattcagcagcgccaaactctgatcaattgggtgaatcatagagagggttatattcttgaggatgattatgacagtgaattccgttacacgcagcagccgtttcccgctcttgcttccattcaatcagaccgggtgatttatttagggaatttctcaaaatcctttcttccgggcatccgcataagctatatggttttgccgcagcgccttttgcaccggtataaagaacggtttattcatttcgaaagcaccgcttcttcgcttaaccagctgaccatggctgaattgatgaaggccggtgaatggacccgccatattaagcgcatgcgcattgtttacaggcgaaaaatgcagcacttgatttcatatgtaaagcagcagttcggcggtcatgtgacgatcatcggcgaccagtcgggtttgtatatattgatgagagttcacctgaactatacagaagaaacattaatcgaacgcgcttttcagtacggagtgaaggtatatcctaccgccgtttatttcgttgccggaaagcctgaaccgccgatcataaagttaggtttcgcccatctcgatacggatcagatcacacagggcgtacagcttttgagaaatgcttggctgtcatgaaagaaaaaaggcgccgaacggcgccttttgttatcttttatttcgtatttcttgtgaatttcggcagtccaaatataatggcggcgatgccgcagattccgattaaaacgggatagaaagagtatggcaggatgctgacgggtgaaatattcccgaatttcccggctgataacagctgcgcgccgtaaggaatcaatccttgtatcatacacgaaaagatatccagaatacttgccgattttctgttgtcgatgttgaatttatcagcgatattctttgcaatcggcccggctgcgataatggagatcgtattattggcagcagccagattcgtcacgctgaccagtccggcaatgccggcttcggcgccttttttcgaacggattcgtttcgtgatgaactccagtaaaaagtcgatcccgccgttttgtttcatcacgccgaccatcccgccaatcagcatggacaggatgatcagatcgctcattccggcaattccatccgtaatcgccttaaaataagagtcaagcgtcaggctgccgcccgctaatccgatgattcccgtcaaaaccaatccgccgaatatgacagccatcacattaataccgattaacgcaaaaaccaacacggcgacataaggaagcaccttaatccagttgtaagattcagcacccgtatggccggcgtggcctgccggaataaaaaataagataataacagtcacaatggcagcaggcaaaacaatcagaaagttcgttttgaatttatccatcatttgtgttttttgcgtccggactgacgcgatggtcgtatcggaaataaaagaaagattatctccaaacatagctccgccgaccacagccgcaatcggtatcgcgctggagatgccaagctcgccgctcaaaccggcgctgatcggcgcaaccgccgcaatcgttcccattgatgttcccatcgatatagaaatgaaacaagcaatgataaacagccccggcagcaaaaactgctgcggaataacgctcaaagcaagattgacagttgaatgcaccgctcccatcgcttcagccgccgaagcaaaggcacctgccaatataaaaatcattaccataatgataatatcaggatgtcccgcaccggaagcgaaccattctattttttgattgagcgatttcttccggttaaataacagcgcaaaagctgacgcaatgatcgcggcaatcaagatcggcaatttataaaaatctccggtcaccagaccagagccgacaaaaagccctacgaataagactaaaggcaataacgcccaagggttctttttattgttcatctgggtaaaccacctcttttcagcattaaagtcgctaatcacagtctaagcaacatttcacactttaaaagtctgcagtaaaaaagtcaagctgaaaaaaggataagtaatgattgataagatagaaaaagctgttttgtttccactctttagaaaataaaaaaaccaaggctcgtttcccttggtacatttcatgcggccccgcgtccgggacaccttctcttcattcagaaatacattcagctttcaatctgtttttaagtttcgcttcattttcaaggatatcttcgtaatcctcaatcttcctgtttaatcgttttatggtttcatcaatttccctctgtttctccgtcagccttttcctttcatttataaggatgttttttcggggttcgatcgtatgatcggctccttcaataaataaagcggtatattcaatcagcgcctcaatcgacagcccggcacttctcatgcattttataaattgaatccaattcacatcatcttcgtcataatcgcggatgccgctttcatcgcgttttaccggaggaatcagtcctatactttcataatacctaagcgttgcggctgataactcaacctgctttgcagcctgcgcaatcttcatatttttaccacccgtccttcatacctttcataagcgtgccattatagaatatcatttcataaaaaaataaaccaaactccttgacttaaagtccgctttaacatttaaagtaaaatcgaacagaggattcatcactttatcttggaaaggaagataaccatgtgcaataatcatccgactcgtgtattaagcgctccgcatgcaaaagctaaatttgagcggacaacgattgagagaagagcattacggccgcacgatatcctgattgatattaagtacagcgggatttgtcactcagacatccacagtgcattcgatgaatggggcggcggaatctttccgatggttcccggacacgaaattgccggagttgtggaagccgtgggtgaagaagtcaccacatttgccgtcggcgaccgtgtgggtgtcggctgttttgtagactcctgcggggaatgtgaatactgtctgaacggagacgaacaatattgcacaaaaggcgttgttcaaacttataataacctggactacgacggaaaccctacgtacggcggctacagccaaaaaatagttgtcactgacagattcgttgtccggattccggatcagctggatttggatgctgccagcccgctattgtgcgcgggcattaccacctattctccgctgaaacactggaatgccggccccggcaaaaaagtggcgattgtcggaatgggcgggctcggacatttagccgttcaattcgcgcacgctttaggcgcagaggtcaccgtcctcagccgctcaatgaacaaaaaagacgaagcgcttgaatttggagccgatcattactttgcaacaagcgatccggatacatttactgagctggccggacgatttgatcttattttaaatacagtatccgcgaaccttgacgtagatgcctacttatccctgcttcgcattgacggtacattggtaaatgtgggagcgcccgctaagccggactcatacagtgtgttctccttaatcacgggccgccgcagcattgcgggttcactcgtcggcggtattccgcagactcaggagatgcttgatttcgccgccgagcacggcattgctcctaaaattgaagtgataccggccaatcaagttgacgaagcgtacgaacgggttctccaaagcgatgtccgctaccgtttcgtcattgatatttcaactttataatcgacataaaaaaacataccaatatttgttggtatgtttttttcagttcaaattattttttatttcagcagccatccgggcaccgcttttatataaaccaattcgcctatcaattcaacaatcgtctgtgtgacgataacagcggcggctaatgaggcccaagcatccggcagagccagcgctaacggaaggactgcgagagaatttcttgtgcccgtgctgaagatcaatgctcttccttcacctgtatccagacggaacgcatatgcaataaaccgggagacaaacggcataatgagcaggaataacagatagatcggaatcacacgtataatgatgccagcatcactgatgacctttccgatttgtgtggcgacgaccgccagtaagaccagagccataaaaggaacaggcagccacgccgtccactccaacaccttttctcccgccggcttcttatcagcccacaattgtgtcatcactgccgccagcagcggtcccgctattaaacataagaatgcttccagaaacggccccgcatgaacagcccctatcacttctttcccgataaacagccacaagtataacggaagcaataccatctgaacggcgaacaaaactggcgtggaagccagtattaatctctcatttcctttgccgagctgagtaaagacgatgacgtaatcaatacaaggtgtaagcaataccaaacaaacccctgataatataggaggagattgaggaaaaatggcggttaacacccatacaacgaaaggtacagctaagaaattaccgatcaataaagccgccataaacttgaggtttgacaaggcttccctcagcttcaagaatgggatttgggcaaacatggcatacatgagaacagcgataagcggtgatatcgtccatccccagctgagtcctgaatctttcccggcgatccccgctattccgccgattacaagagtcacaccatatatccaaatttgctgtttttctaatgtctctctggttattttcattggctgacacctcttccccgcccattataccttcttttctgctgctcttgcattatggttctgccggaattaaaaaacaccaagggtctgtgacacttggtgtttttggaacgcggccgagaaaaacgggttgaaaaccgttaatccttgtaaataacccccaaaaagtatttttgacatactgttccttatcgaataaaagcattctctttcatttccaaagcatcatccagccatctcgggtgcatcggcaagagatgttcaggtaattcatggatatcaaaatatctgatttccatggcttcctcagtggactttttcaaagtaccgccgatgacgtcacattgaaaacaattggtaataaaatggctgactctgccgtcagggtatataaaggtttgtgaactcggatcagaatagacgcctatcattttagagactttcaccactaatccagtttcctcttctatttctcttataattgcttgttcaactgtttcaccaggttccacatgtcctgaaggaatgccccataaaccattatcagcacgcttcattaataaaacggaacttgattctttaatcataattccagcgactccggctttcacttgttctgtccattggaaatccggttttttacgtacttctgcctttatttcattatcgaacaagtctttcagatcgcggatcacaacatccggatttctaaaatcatgttttgcaggaaataaagtattttgttcagaaactaatacggaagttatgcctatttggtttgctccgacaatatctgtttcaggcgtatccccaatcataacgcatctctctttatcttcaaaagactcgagtactttttcaaatattgaagacgccggttttccaattataatcggctctttagcagctgctgttttaacagccgcgactatagcgcctgtcgcgggagctggtccgttagcggcaggaaatgttttatccccgtttgcagcgataaatgaagccccgcagcggatgaggtttactgccttatgcacatcctgaaatgtaatattttgatcccatccaatgacgacagcctccgcctgatcttccgtaagatcaataccggccttttgaatttcacttttaagttggtcatttcccaatatatatgccttctttattccttcactgacaaggtaatcagctgttgcccaccccgcagtaaacacttcatcaatacttgctgaaatccccagtttatgaaggcgtttcacaatcgtttctcttgtaacacaaggatcattcgttaaaaagcgaatggctttcttttcttcacggagtcgttttaaagaggccacagctcctggtaaagctttatctcctatatatatcactccgtctaaatcaaataaaaatacatcataattcttggagatcatcataacactccttaagcggttgtctcttggttaatagttgagcgatacgcaaaatgatttgtagggccttgtcctttcccgattcctaagggatgtttaatggctgctgaaatgaattcctttccagttgccactgattccggtatgctgtgctgctttgccagctctgcagttatcacagctgaaaacgtacagcctgttccatgagtatgctttgtatcaaagcggggagaaacaaattcctcgaagtcctcgtcaaagtacaaaatatcacgggcttctccgttcaggtgccccccttttacgacagcactttttgccccgtatacctccactatttctttcgccgcatcacgcatctgctgtacagtctcgattgattttccgatgattacttccgcttccggaatgttcggtgtaataacagttgtttggggtattaataatttcttcaaataatcaatggcgtccttatggagcagatgatgtccgcttttagcaatcataaccggatccatcacatacgattgaatatttgcgtcttttaacttttctgccagcaattcaataattcctatacttgcaagcataccggttttgacagcatccggttttatatcatccatgacacagtctatttgctgagatatattctgaagagacatctcctcaaaacttttcacaccaagtgtattttgtgcaacaactgatgtaataactgccattccatataccttttgttcctgaaatgtttttaaatccgcgtgaattcccgcccctccggaaggatcagtcccagcaatcgaaagcgctttataaatatccgtcaacttacactcctccttcaggcaggtttcactgctttaaaaatgacaaaaggcggatattccttttcacatttccaattattaaattgaaactctttctctatggcttttacatgctcttggtcaatatcgtttaacgttggttctgataaagttacattttcaaaacctgcatgagttaatagtttataatacattgacttcggccaatgaaaatcatttaaaattaaatctgcttgtccgggaacatggagccattcatttctttcttctccgtaagaatattctttccccggtattccattgcggaaggttgaaaattcaattccggttgaatcaggattcgtatcgagtatgacaaatgaagctcctggttttaacacacgaaaaatttcatttatgatacctttgatacgctggtcactatccgtattaataaaaacataacaggccattgcagcatcaactgagtgatctggtaagaaggaaagattatcgtgttcaattaaatgatagtccacatgaggatgttgtctttttgcctttgctatatctaacatcttccttgattcatcgactgcgatcacattgcagcctattctgtcagccagcctataagctacctttcctggaccgcatccgaaatcgagcacctttttaatctccgctttatcaaaagtacgaaaaacaaactcaaaacctaacgtttgttctaaaacgtcattataagcatcgaatttaccagcaacactgtcttctttccatgaagttttcattgaatttcctccttttgctcagttgagaaataatgaaaccacttattcctgacgaaaaattgatatataggaagtaaactttgaaatagagaatgatccatatcacgtttatatgcaatatgctggtatatactgaaaaggaaaagaatctgtttccagtaatcaggtaaatcaagcatttcaatatcgttttttgtcatagaaatttgatctttcctaagtaattcttcgtactttaagactgtttcaatggacggccagttatttccctcaggcattttcggaaattcaaattccggaatatcatggtgattttcagcttcttcaagcaccgttttcgcccattcatgatctgaatcataaatatggattgatcccgcattatgaaaatattctccgacttctacacgcagttctctggccattaattcctgcatgaaggtaaatgagaaaagatcactgatcatcccgcgaaaagcatcatttgcacgcatgacagaagacatgtataattcgccttccctcacaaaaaactgcaaaccgattgtgcaggaaacatctatattttctaaaacgaagagttccgaagcatcgaatatttgaataaatgccctttttgaatcaatatcttcttgtgtcaaaagattttttattctattccattgatttagttttgcatttccgaattcaaatattttaggcccgtacgcagtgcctgttaatgtttttttattcattgagtatgaaggcatttttttattgtaataactgataaaatctaagtcgttactccccgataaataccatagcacttcagcaaaattaaacacgatattagtttttcttgaggataaataagtgacacgttctattggattttccagagtcagatggtagttcaattgttctctgcttttttgtccgcgcggtgaattgaaaaattcagggttgtgatagatgtcatacagcgtttccgtatatgcttcatgaaaagttctctttctcattgagattccgccttatatgctgcaaaggtatttttaatgttctctaataaatcatctgtatctttatagctgatgtactcaacatccgccactgcatgtaacccttgaattaagaaagcataatccttgtccttttctagaaatagcacgatcttttttttcaaggcggaagcccatccaatttctatatgtgttccaggagaagcgggtgatccgggaaatgctgcaaaaaggtcgcaagtacttatttcatcaaaatcaattttagtgcattgaaggggtgtcatgaaatctttcccccacccttcccgcttgtgagcattatgaaccagccatccttcattctcaaaaaaggaaattaatgattccagctttcccctctcatacgcactcatcaatccagttttctcatctactaaacttttaaaaggccctgccagaaaaacttttttagtcgccacttcatatcaccctttcaaaataaataaagccactttcctctatggaaagtggcttaaatatagataagataaagaatctctctaatttttcacttccctacgctggtattaaccaaatcaggttcaaagggtcaggacgtattgtctcttctcagctattaaagctcccctagtgactttttataaatatttactttaattctatgctattccatataaatagtcaaacaatgactttcccttcaatattgcagcttacccactagttttaaaaccttccggcctcttttttcctgccaacgaataaggtcacggcaacactcgctgaactgaccaaagtccccagaacggcagcaagaattgtcaaaaagccattgggaatcagaaatccaatcggaatgagccccgcaaacgtgaggacgataaaacattgatagactccggatatgattcttacaaccaagctgccaaaaaaggacatgacgaatggcggaatgaacaaacataagatgattccgagtgagatcaataaaatcataggctcgtcaaaagaaatgacacgatcgccgggagactcttcagcagccgcgaatacagcaaatatagacatcatcagcgtaagaaaaacaagaaaaaaccttttcagcaacgggactgaccccataagatgagacaaataaaaacaccttcaagtttgaatacggatgattgttatccgaaattagacttggaggtgttttttctatggggacaagagtgagttatccggttgaagcgaaacagaaggctgtagaaatgagattggcaggcgtacctatgaaagagatcatgcaggagttgaatattaagaataagacacaggttcagacatgggttagatggtataaggctggtgatacacatcgattcgaacagcctgttggaaagcaatacacttacggaaaaggtccggagtattcttccgatttagagaaactgcaggcagagattcgttacctgagacaacagaatgaagttttaaaaaagtacaacgaattggaaaggaagttgatagcgaaacgtcagtcgaacttgtagaaatattgcacagcacaatgaccgtacaggatatctgtattcatttaggtatctctcgagcgtcttattatcgttggaagaagaatctgatgaaggatcatcccaagcgccatttggaaaaacaaatcggcacgttgtgccgagagcacaagtatcgatatggatatcgaaaaatcacagccatactaaaaaagagaatgtgtattaaccataaaacggttcaacgtattatgcagaaaaatcaatggcagtgtcgggttaaggtgaaaaagcgcaagaaggatgggcagccatatgccgtggtcgataatatattggatcggaactttcagtctgatcgtcctcttgaaaaactagtaacggacatcacatatttgccttatggacagaaacaattgtacctttccagtatattagatttatacaatggagaagtgattgcttttactattggggataagcaggacacagcctttgtcttagacacacttgatcagctaccaatgctgcctgagaactgcgtgttacatagtgaccaaggttctgtgtatacatcttacgagtatcaaaaagctgttaaaacaaaaggcattaccatgagcatgtcccgcaaagggacgcccgctgataatgcctccatcgaatcgtttcattcctcgctaaagtctgaaacgttctatcttaacagcattgatcgaactacgactgccatcgtagaacgcactgtcatagaatacattcattattataacaatattcgtattcaaaccaaactaaacaaccaatcaccgataaactatcggcaattggctgtttaaaaggtgttttgacccctgtctcaaaaacggggggcagtccccaacgttatgactcctttttttataaaaacgggtatctttttttcaatcaagataaccattttatgttatcaaatgaaataatatgaagtcaaaccgagttctgcacctgatttattggttcttatttttttgataatttccatataattgtccgcaagcagcatctatatcaatgccaaattgacttctgacggtcacgttaattcctgctgactttaattttttatagaagtttacaacttgtttctcatttacttcttcaaatctcataggtgaactaacagtcgggttatatctaatgatgtttacatggaacaagttccctctcttatatctgcttcttaaaagatttactacttcattcgcatgatcaatagaatcattaactcccggcagcataatataagcaatataaacttttcttgaggtcacacgtatatgctcatctaatgtgtccattacctccaataacgggtagcgttcattaatcggcattaacttgcttcgctgttcattaaaaggagaatgtaatgaaaacgtcaggttgacctgcggataatcctgagtgatttttttaatgcccggaataatacctatggtcgaaatagataacctgcgagggcttaaagcaaacaacttcggatttgtaagcacatgtaaagcatcaaaaacttgtacattcgctaatgcttctcccattcccataaaagaaatactgtcaattgaatgtccttttaagtgaaagtacaaaatttggtcagtcatttcatctgacgttaaattgcgttttaaaccaatatctcctgttgcacaaaatttacagccaaaatgacagccgcactgcgaggatatacaaaatgactcccaaccggctttatatttcatattaaccgtttctattttttcgtctcctgaaatttcaaataagacttttgtaacttgctcagaatgctgcacttttaaaggagcaatatttaaaattgactctccgaactcctctattaacaattttctcaaggatttaggaagaaccgttatttcattgaaatgatttattctcccttggaatacagcatttttgatttgattcattctaaaatcaggaaatttattttgcttcaggaactcttgaattcttatatacttgtttttttgttgcatgttttctcatccttccataatactcttgtttgtttgagtaaatagaagggagtgatcatctaacctttttttaaaatcaggcacaaaaaaacaccgacacaattatcggtgttacgcttaaataacatcatgcacaaataaacaaggacattatgtcattggattatcgtttatttgacatagagaaaaagcaccgataactgtttttgtatggtgatttggcttaaaaaaggacagactgctccctttgtccgccaaaatgtttccaatttttgcatttttaccatacaaaattccataaatcgttatcatcgctttcacctctttcttgtcaatattagcaataatcaccatatcataaggtttcccttatgtaaagctaaacaaatgcttacgcccccgctaatgacagtattatataacttgcttattaagcctaatccaagtacagaaagcgcgctgatcacatttttcacttatccgcgacggaacatttcttatataatgggtgaccggcagctgcctgcttgaatcccaatcttcctatagtgattttttatattcatgacagtatgatgatttgtcacttcagcaatcagatcgtttattcgatccagattaatcggtttattttctgataagctgctgaagctttctctgatttcttcaggatagacatttccggccatgcttgacaggccgttacacccgttactcagcatcttcggaaattcaacgtcccctgccgcaaacaaaataaagtgatcagggaactctgtttgtttatgacgcagaacgtctcctccttctttcagcccccttatcccgggatgccggcttattaagtctttaagcgctttctcactcagattaaaaccggtccggccggggttattataaagcacagcctctttagaggtatgactgagaagttcgtcaacgtaataaacggcttgctgctgtgtcggtcttatataaggaggaaaaccaatcagtacagaatcaatattggttttctcgatgtgtttcatcagtttgacggcatcactggttcttacggctgaaacaccgaacatcagttcaacatcttcaaattttcgctgattaacatactcaatgatctgaagacgctcatctatgctgagtgaatgctgttcaccagtcgtgccgcatatgagtaacgaatggataccgctgtttttcaaatgttcgacaatagcatcaaatccttctacatataaactttcatcttcatgaaaaggcgtagggatagcaacattaaaatttcgcatgagaatgtcctccaagtacatattcttgaatatctgcagagtatcatataacactgtctgacatttaaaaaggtacagtttcagacaactcaacatgtcagatgtaaaggctgacacacaaaaaaagcaggcaaagagagcctgcttcattgcttcggccataattgttttatccaattggttttggaaggctaaaatattcagactcatcaacatttgatggattcatttaggcacatgcccttatcaaaaacaatctgggtgcatatcctgctcctaaaagtcattcataaagggagtttagatatgtattattattattatccgtattatgtatatgattacagacagcagcctgatttaagccaggcaaatcataaaatgcgaagccatttatctgcgattcaacaaattccaatacactcatcctcctttcaacaatcaatggctgcggtagtgaaacacttgcaggctgtcagcagagcactcgctctgggatgcggtatgagttcagaattcagatttcttccagacacttggggattacgagaacttcatactgtacacgcgaaatatcttactccgttgagctatcacgtttattccgctttaggcgcagcagagcttctcgccgccggacaaggccgggctcctcattttcctcttatggttggctgcatgaattcaatacttcgtctatggtcaaacttccccgcagcgatagcagacctgagaagagcagccggtcaccaatacgcgtcatctgtagacgaggcggaaaatctcctaagaccaatggttccagccacacaacaggcattatccatcagtcaatctgcagtgagtccggctatttggcaggcttccttacgtgccgcgcagttagctcgggaagtacgtcagaatgttgcacaatcaatgagtcagggatcttcttattaattaagccaaaagattttttcggctttacacagtcacataaccggacttattcaacacaaaaaaagagcagtaaacacgtaagttactgctctcctctgtctatccgccgttcatttgttttacaatgtattcagcatcatttcctacaccttgaagcagcgctgaacctcgcctatgctgccaaggcaaaccaataaaatacaatccttccacagctgaaacaccccggtgatgtataattcggccttccttatccaaaacaccttctattttcatccaacaaagcggattcttaaaaccagttgcccaaatgatattgtttacttctaatgaagatgaatctttaaaaatcatttcattttgctttccggctatgactctttgttttaagatgatcttcttctgtcttattgcatgttttaattcatacccaaatatggggtcgcctttcttctgaatgaacttgcctaatattgatgtatgacttgcatgtaaaactcctaatttatcaaaccaccaaaagatgcttctttttccaatccataaagggaaataaaccggtttattactgcaagccaaatatgtaactctttctttggataattcaacagctatctgagccccgctattcccgccgccgactaccagtacattcccaggcgccagttgttttgaatgtttatattgtgaagaatgtaattgatgaatatgatcggctacatcccttgatattgatggaatattaggggtatgaaaaggacctgcggccatcacaagattcttcgtttgatattcttcccggtttgtttttattaagaaatagttctttaatttttggacacttattacttctgtccgtaattggatcgggatttcaaatctttcaacatattttttcagataagcagcaatttcattttttgaagggagtccatgcttgtctccttcaagctgcattccaggcaaagagctgtacattcgagaagtaaataaaaccaatgagtcataccggttgttccagctttctcccacttcatgacttttatccaaaatgataaacttttgtttcgacttctttagataatatcctactgagattcctgcctgaccggctccgattactatcgtgtcgtacatatgaatccccccctccggttttatcttaattgtcagcagacaaagtgagtccctatttccttctttaatgatgatgatggtcacgcggattctcagtttgggcctgacaaagaatcgtattgtcgtgattatgcgctgctgtttccatttgaatggttacatgtgtaatgccttatctccaagttcatgttcaattttgcgtaaaatactttcactttcagaaatggtcagttgatcgttaacaactgcgtggcaggaaagagcattcaatccgcttgtgatagaccatatgtgcaaatcatgaatgctttgaattccttctgtctcttcaattgtatgaatgatgtcagtgacatcgatatttcccggagttccttccattaatacgtgaatggagtctttcgtcacatggtaaccgcttctcagaacaagaatagccacaatgacactggccactggatctgcccagctccacccgaagaagatgataaggatcgcagccagtatggcacctacagatccgagcatgtcacttatcacatgtaagtaagcccctcttatgttcaggttattctttgtatctccgccgttcagcataatccaagcgaccaatatatttacagctaacccgatgatactaatcgtcagcataccggttgttgctacctccggcggatgagagaaacgtttgattgcttcataaatgatataaagggaaatcaatattaatgcaacaccgtttatcacagctgcgagaatctcaaatcgtttgtagccgaatgtcttatgatgacttgcctttttttcggccaatttaaaagcaatcagagcaaccattaatgagatcgagtcactcagcatatggcctgcatctgacaaaagcgctaaactattggttaaaaatccgcctatcgcttctattatcatataacctgtaatcatgataaaagagatcaataaaaccttcttattggatccgccagcgtgattgtgattgtgacccataaaaatctcctccttatctcatacactgcatttattatttcttttctgttatgaagcattctaacatggacaaaaaaataaccttatatgattatgtgctcatatatgaatatataggttctttactgaaatgtcaaaatcttttcaatgaaaatgtccaatactttatattgctcttgatcaatgattgctatgaagccgcggattacagtaattactttaggcgcagacaatttagaaaaatcgcttcacttctatcgagatggcttgggtctgcctacagagggaatagtcggtacagaatttgaacatggcgcagttgccttttttgacttacaaacaggactgaaacttgccatttggaaccgcaaagacatcgcacatgaaacaaacgttacgttaactgcgccaagccctgcagaatttacatgaggacataatgttggcagtaaagctgaagccgataaagtcatggaacaggcaaaacaggcaggagcaacgataactgatcccgctcatgatactttttggggcggatactccggtcacttccaagaccccgatggacacttatgggaaatcgtttggaatccgcactgggatataagtgaataaccacatttcagaaatgaaaacatcaataaaaacacacctaaatgttctggtgtgctccaataatgatgtttagaatgcaaacgcagcattttatttgtttcccaaaacgatcaaactatttatacgatggcgggatgctttgcggaaaacggaatacattttcgggatcgtatttcgcctttattctttgaagccttgcaaagtttgagccataatatgcttttccgaagttctcgatattttgatccggaacattcacatatgaacctgttacatatggtttcatcagctgacgcactctttcaactgatgcaagattcgaagcttcttgtgatttatttttccaactggccgtccattccgtataaaacaacggacggcgccaatagaaggctgtttcactgcttggtactctgcttatcgcgccgccccaattgataaaaaagaaattggtttctgtcccagtcgctttttctaaaaattgtctcattactgcaataggttcttccggccaaagattgagcgcccacgccgaggagaatttaacactctgatcagatctgccgggaatcggttcgtcaggatctaagaaatctatacaatccgggtagtatagtgttttgattactgtttgtgccggcgttccggcatttaataaaggttttaataattgaaccagctctggttttgaaccgaggaacaatccttccacatggcacaagccatttactttgctgtaaatctcaaggtagcatcctaatcgttcgtctgtaaacggcgcccatttttgccacgctttaaataccgtttctaactgttcccacggccaaatgatattaaagacggttgcggttttaggggcacggtgaactttgaatgtatattgggtgttatatccgaaattgcctcccccgccgcctctggaagcccacagtaaatcttcattgcgggattgatttgcttgaataatcctgcctttggcatctaccattttcagtgcgagaaggttatcgcttatcaggccgatcgatcgggaaagcactccaaatccgcctcccattgtgattcctccgattccgacggttggactgtctccgaacggggccataaaaccttcccgagctaaaccttttacaagcgggccgacgtgaatgccggtttgaacggttgctaccgcgtttttttcatctaagaaaactttattcatgtcactcacatcaataacaattccatcacttaccgtggaaagatttttatccagagcatggcggccgcttctgacacgcataggcacattcttctcacgagcccatttaatagcattacttatatcgtatgaattttgtgcaaaaacaaagacaagcggacagacatcaacataagggttccaattcttaaccgcctgtgtatagccggggtcccctttgaagatgacgcgtcctgttaactgtgctgatcccatctatttcactcccaataagcatttgattccgataccagtatatgtaggaattggacaaattcttagacagatgttctgcaaacttaaaaatagatacatatacgcgaagatgatataaaaacaaaaaaaaagacaagagcggcaagctgccgaaactcttgtctctcctgccttttttatcatgataggcacttacatttattggcgtgatatcccgaccaaactatggaagtccatagaaaattatgtttgccctgccatgcgtggttctgctgagacaccggctgagcaatctttctgcttgatcccccgacaaagaatcttattctttatcgtttttgcacccctgtacggttaaaatcaatacacattgaatcttatcttttacatgatgaaaagatcttattttttcttcttgtgcttacgtttgcaatcctgttttttctctttcttatgacgttttttacatttcgctttggctgctaattttgccgcttctacctttgcttctgctgctgcttttgctgcttctgctgctctggctcttgcttcttccgctcttgctattgcctcttccgctctggctctcgcttctgcttctcttgctgcttccgctcttgctgcgtcgtccgccatatcaaaatcatggccaaggtcacaggcttcgttgtatggctttttcttctgaacgtactgttgatcttcaccttcgttataatacattacgccactccttctctcatcttttaatctttacatactatgtaaagaaataactgcagcttggactggtattttgatgaaccggcacattttaggataattttcatttatcgatacaacagattctggatacttgatgaaacttaaatgtttatgataagcagcgtaaaaagggagactacgaaaaaaccaagggttaaacccttggtttttttgtgaaaatgataaaaaggatgctgcgcgctgcagcatccttctgtaccaactttttgttgaacgattggaaagtgttttttggcttttagtttgcttgctgtgtttgttttactggttctttgctaaaaagtccgacaatgttccacaagataattgcagcagctatgattacacgagtcgtactgacttcttggttagtaaacaatttatagccatatattgaccccaatgctgctatacaaaaaatattgaaccatttactccaacgcaattagaaaactccttataaaatgattacatttcaaaacaatgtattataatattaacaaaatttttcaataatttaccttaaatcattcttaattggttttcctgatcattttctctaatcgtcttcgatctttcggatttttgatcatttttttgttacaggctagacccagacatcattttcagctgtttgatcagttatttcctgcccggtattcacaacacctttaggttctacaagcaaaatgttacactctgattctgcataaggtttatgttcaacatttttcggaatgacaaacatttcaccttcatttaatgttacttctccatcacgaaattcaatgattaaattaccctcaatgacaatgaagacttcatctgtttcgtcatgcttatgccaaacaaaatccccttgtaccttaacaagtttaaattgatagtcattcatttcagcgattacttttggagaccattgatcttggaacgcagctaatttctcttgaaaattaatcggtttatattccattctttccgctttccttgtaaaactctatcatttaactagtcccaaattaaaggcctgtccacttcagcagttctgagatagtctaaaagctgaccggtatgtacggactcatggtaagcgattcttaataacatgtctcctagttcgcgaatatatccaacatcagacctgtcaatctttatatttgttaaatctgtttcgtttaacgatttgatgaatgtcaaaaactcggcccgatacggttttgcaaattctaattcttcgcttacagtggtaaacatttttgattcataaggattaatagtttcctctgaaaactcactcatatttttcattaaaatttgatgataaagaaattctgcttctaatacatgtcttatcatttccttacacgacatggcttcggaatccgggcgccagtccattttttcctcaggtatagctgcccataacttgatgcttcgccgtcttacctcttcaaaatgtaaaataataaggtcaattgtattcaagtgttttcccccttttatttttataacctattctccttctttccaggaataccttcatgagctgcctcaaaaaattaaagatatattcctttcgcctctaaataaatagtcccatccacatcattgacagacgcggtgttaaaaatggtgagaaacaactcgctagattgataaatcgaacaattttaagataaagagatattcattcatccatacaatagactctggctgaacatatactgaatgatagttttcatcagaaaggagaaatcagctttggcaaaatatcggatcatgacctttgacgggggcggaaccttaggtgctttaagtttacagctattgaacagactggctgaagaaaatccagaattaataagtcgaacccacgtatttgcgggaaattcaatcggttcatttactgcccttgcattagcaagcggaagatctccgagggaaacacttcagtattttgaggatgaaatcctgcccgcattcagcacttcccggccgggcggacctgttttcaatcaacaattaccatattccggttttattaaagcggtacgaaactttttcccgccaggccttcgccttaaagatctaagaaaacgaattgttgtcccttcattcaaattatactccccggcactggatcgttggacgcccgtattatttcacaactttcccggctctccctatttaaatgagaaagtgagtgatgtcatactgcggagcagcggtgctcccgcgacgcagcgcgcctatcaaaactacgtggacggatatgtagtggcaacgaaccccagtacggccagtatcgcgtttgcggttggtaaagccaacgtgccattggatcaaattgcggcgctatccatcggtacaggtgaagccccgactcggttaagaagagatacgaggggatggggaatggtgagtgcggataacatacgtcccgaaaacctgaagaaccttcctccaaattggggagtccttttggacaggtcgcctaatgaacctttactgccatttcttcagatgatctccggcggaaatggctactatgaatccatggtcagcgcgaatctgctgggagatcgctttttccggttagatccgcggattcctaacttctccaaaacagacccttccgtggttcccgctgtcattgaaattgcgaacaaaaccaacttacagcctgtgaatacatttatagagaaaaactggaacgacagccattaactaagttagaagtttataataattcaatgaacaaaaaataccaagggactcaaaacccttggtattattaatgcggccgagagggtttggaccttcacggggtatttatacgctgggcattcgataaagtgaaatcttattaccgcccggcatttcaaacactgaagttaagcattacaaccaacaatcgggccatttaattgaataggactactcagaagtcgcttccattacgtaagaaaagcgactttttagatttgattttcaagttcctttgacaaattttgaaaagaccattgactattcagttgaactgtattaagtttaactatatagtcagactgaatagaggatgaggatatgaaacataaattattaccgctgtctgaaaccatgcattatattttattagctctgcgggagccgcttcatggctatgctgccatgcagaagatcgaaaagatgagtaacggaactgttattttagcagccggcacattatacggcgcgattgaaaacttgaataagcatggctggattgaacctgttggagaatcgggccggagaaaagtttatatgataactgcggaaggaagcgccattttgaaaatggaacaaaacagattacttcatattttatccctgcacgaaggaagtgaatcgaatgaagaaatgtaagatgttttttgatattgaaaaagaggagcaatggctgaacgagcacctacaaaaaggctatcactgtacaaatatcagcggattaggaatatacactttcgaaaaaaccgacaaaaaatatgtaatgcgactggattatcaagattatttatcaaagaaaaagttcaaagactacaaagagatctatgaagacttcggctggagttatataaacagcccatggcttagcggaactcgatattggcaaaaagaagatgatgatcaaaatgaaatcttctcggatcgccaatcaaagagtaattattataaaagactaatgagtttttcatcttgttttgggttactgtgcttgttttattcttatttgatttacaaggattcaggtttgtatttaactgaaggtctgtggagtatggaaagcgcaatgttttggaaagcatttttatttgaaactccatttgcccttttgaggtcgcttcccgcccttatggctgttctatttggctgcagtttctataaagcgtatcgaaagtattcaatgttaaaagaacaataacgcgggggaagttacattcaaagaagtaatcgaggatcatgtatttgccgaatccgggcgctttaacggaaaaaaagcgccctgaatttgctgataaatcagacggcttattttgttaataatacatacttatttacaatggcttgagcgagacaagctgatgaatcaacaaaggtaagtccgcttcttttttgatccgtgaccgtatttaaatccgtacatgcaatgataaccgtatcaaccttttctgctaattcacggtgtaattcatcatataatgtactagccttatcgatttgaccttgtttaatcttttctattatgtgatcgacatagatttgccaactatcttgatgtaaaaaatcataaccttctctgtttaacgcttcttgaaatattccagattgaaccgtaggaacggtggctaaaagagctgctttttttgagcctttaggtatttttttatggtttcatcaaccatgtttagtaaagggactgaaatcgatttttttatttgattaaaatagatatgtgcggtattacatgggatggcaataaaatcaacacccgttttttcaagctttacagccccctcaataattgccttttccatgtccgtatgattgagaggtttattcatgtagaaaggtgtcggacaggaataatcatcatatgaggaaaatccatgtcatgtattgctccatatattttttggcactcgtctactaccttatctacaaatggcccagtagattttggccccattccagccagtattccaatcataattgtcctcctctgtaaaaatgtgtacgaatacgatcacgatgagttattcttgtgtttctcatctgaatctgctctcatttctttttggctgtcttctcctattttatcatttcattaatcgaattatcatatctaattccgccgcacgcagaagaatggcagatacactaaggttatgaaagcttgttttcattacactctctatcctccactttcatcatttctatatgttttcatgaattatggttaaaaatcggtgattaaattgtgcccatatagattagtaaagtgtcattgatgtcaaggcatgaactcctaaaggagatttaataactcattttcaacgaaaaactgatctctgttaattagtcgagattccaagatatacacggaccaattgaattgatctttccttttttgggaatcccacaggttccctcttgttttgatgttgttttttaaaaaaagttattgacaccaataaatgaccatgttatcattaaaaatttgatatctcactccatatatgataaccttaagttaagttcccatatatggaggtggattatatgtttcaaattggcgataacattgtttatccaatgcacggagcaggtacaattgaagccatagaagaaaaacaattcttagaggaaaaacaacagtattatgtcataagaatgtcaatcagtaatatgacagttatgattccaacgcgtaaaatattgagttcaaatatacggccagttactgatatacgtgcattaaaacacattatacacatttttcagcatggagaatcagataagttactgccgtggaagcaaaggtatgtagtaaacacgaacaaaataaaaacgggtgaaatacaagaaggcgttgaagttgtacgtgatttaatgcgaatgaagaaagaaaaagcacttaattcaagcgaaaaaaaaatgttggataatgcatatgaatttttgattagtgaactggaagtcattaaaggaatcactgaaaaacaaataaaaagtttctgctaaggttaattttaaataatgttttgcattccaaaaagcacccgcgagttttcggaatattacgattaaaatatttcaaagacgcttaacttcttcaacttacttttagaacattaacctcttttattattcctacaatctaatctgtttttattattaaaaatttcttcaacgaacatttgatgttttatcaaaaaactcgatgaaatagtcacttgatttttgtaatcctgattcacactggcacggacaaggagccgtaaggatggaagagaggcagggctttcattgttttaggtctaagtgattatttccagaagaaaaaacaaccactcccctctttatctttaaaatttcttacatctgcttccacagtgaatagcagttggttatcttcttttcataaaagagatatgcgaattgtaacaaagaataacatacagttatcttgagaacataaaaacaaatcatttatatatattccacatatcgtcaatccggtatgttatactgtaaacaatcctttgaggttttaaacctttttcttaccttgtagcaactgtccctactcgaacgttgagtagggtttttttattcactatgatacagagaacataaaaaaacaggccctatataaagagcctgtttgtataaacgattgaagattaagcagttttttgaacgttagcagcttgagctccgcgagcaccttgctcaacgtcaaacgttactttttgaccttcgtctaaagatttgaatccgtcactttggattgcagaaaagtgtacgaatacatcgtctccattttcacgttcgataaatccaaaacctttttctgcattaaaccatttaactgtaccttgttccatttttgttgcctcctagtgtgttacacattgtattactatccttgcccaaagtatcatcaagacgaaaagtcgatattcatactatcctttacacgaacaaaaataattctcctttatcatatcacgaaacggaaataactgcaaattaataatgtgttcattcatgttttatttgttaaacctgtcgataccagtgcaaaataagatgcctattaatagctatggtttgaaaacaccgtgaaaatgaatcacgagtgccttcaaacccagtacttcatattgattgttaaagatttctttaaaaagctcagctgtttcttgttcaagtacaagatattcttggctgttcactggtacagctttgtttctgcagatgtttccaaacgatcactcaggtatacccctattttaacggtattaacttgtcatgtttgttcctcaaacaatcaaaatttacggtctaaataaaccgattcacattggggagcatggagagagtttggcccgataaagagccgggtataatcttcatacgctttttgtatcccggctggccattgctaataaagatttaatcgagatggaaacaagtatctcatttccaataatttcacagacgaatgggaaagatacttatcatctatggtgtatgacgctgtgacttcaaagacaaacgttttcgatacttagaagaacatcagggaaggggaaatctttaaaaaatgaatgaacaaaacctaaggactttgagaaaactggttacaccctatgaaaagtccgatttacaaaaaagtatatgtcaaatcattaacacattggtgccatttttcctgctatggtatttggcatataagagcttgtccatttcttatttccttacattagccatttctgtcgttgcagcaggttttttagtaagaaccttcatcatctttcatgattgctgccactattccttttttaagaaccgaaaggcgaatcgaatccttggaacaattactggaattctgactctgcatccgtttgatcattgggcacacgatcattctgtccatcatgcgacaagcagcaacctggacaaacgcggtacgggcgatatttgggtactgactgttgaggaatataaggaagcctcaactaagacaaaaataatgtaccgtttgtacagaaatccgtttgttatgtttattatcggaccgatttacgtcttcgggattaccaatcgttttaatcgtaaaggggcaaaacgcaaagaacggatgaatacatatgtaacgaacctggggatcgtcgctttggcagcacttttatgttgggctatcggctggcaaaactttctgctggtccagacaccaatttttatgatatcgggatccctcggaatttggatgttttatattcagcatacgtttgaggattcatatttcgaagaagatgagcattgggaatatgtaaaagcagccgttgaaggaagctctttttataagcttccaaaagtcatgcaatggttaacaggcaatatcggtttccatcatgttcatcatttaagcccaagagtcccaaactataagcttgaaatcgtgcataacaacactgaaccattgcaaaacgttccgaccatcacactggcaacaagtattaagtcgttaaagttccgcctatgggatgaagaaggcaaaaaatttgttggttttacccactttaaaaaaacttctaaaagccaggtatcagctcggctaagaacggattaaataaacgcccataatcaatgataatgggcagtgtatcttgcataataaaagtgcagactcgcgcaaagattttgtgcagaggtcagcacttttttaatgccacatgcacttacaacaaaaaaataccaaaggtgtcaaaacccttggtatcattgagatgcgcccgagaggacttgaacccacgggttattcacccgctgggccctcaataaagtgattctttattatgaattacaaaagcctataatatcagcatttgtttattttgattatgaatgtttacttcgatttatttttatttgggagtaaaaatggagtaggttttcatttcaagacagttaatgtcttgttactggtgacatgtctattagagtaaccgcctaattgaaatggctagttctccatgttttataatgaactctggcttgatgaagtttttctatgatttgttctagctttttatctttccatttcttaatcagcagaactcgcggtttgtaacaccttaatattgcctttcaaaatcctttgcataaacgatcttaactttttgactgttttctttgtattccccttaaaattgaataatcactttcccttttggccgtccatttgcgactagttctagcgcttcatttacgttgtctatggtaaattgtattggatgaattgctggagcaatgttgttttcttcaatgattttggtaatctctttaagttgtgcgccgtcagaacgaacgaagataaaatggtattccacgttttgtttcttggctttgcgatcatactttgcgccaacaagggaaaatagcatttgtttccacaatggaaaattccggtcttttccgaagcgtttatttggtcctgtacggagagagagcaatcttccgcccggtttgatgatactcaattcactgtcaaattctttaggtcccagtgtatcaatcacataatccacatttgacaacaagtcaacatagttttctgttgaataatccaaatattgatctgcacccatttccaaaatgcgttcgcgcgcttctgagctgccgctaacaatgacatttaggcccattgcctttgcgattggtacagccatctgaccaaagctgcctgatccacctggaatgaagacagatttacctgactgtgcctcaagttcttcatgcagaccttgatacgctgtgagtccagccagtggtgcagcagcggcttccacgtaagacaaattttttggcatgggtgcaattgcggcagcatcaattgcggcatattccgcaaaagcgccaattttttcgagggggagacgtgtatagatggcatctcctacgtgaaattctgccacattttttccgactttttcgataactcctgtcaattcattaccaagcgttaatgggaattcataatcttgaatcagtttcacgctgcctgtaataattaacatttcgagtggattgactgccgcagctttgacctttaccaagacttcattgtcatcgatttctggaattggaatgtcattgatttgggcatagagatcttttgaatacttggtgatctgagctgctttcataagtgttttcatttttttatcagcatcctctatcatattacgtttattaggtttttacctttttatataatcgtttaggtggaggggaatctttcttttagcgaagtctgacttccaattttatgattaaccctccacctaaacagcagtcatttttagaacgatcattctcaaataattaaattttatagaccgatactgtgaataaatgtttctcatcttcctagtgttattgatgtagagcatcgttatataggtttaataacttgaaatattacatctctagaatcggatagatttgatctcttaattgaaattcatagtttccgtctacaactcctactacttgattactatcataaagctccatcataaaactcgccacttgctcaactgtgtggtacatcgggatatttgctttgtaatcatattctttcgtatcagatgcagttttcatgaattctgtttccgtgattgctggcgctaaaactttcaccttcattttcgcacctttgcgttcaagttcttttgcaaggccttctgtaaatgcactgacaaagtatttagatgcagaataagtaatactgccaacagcaattgcatatccgagtgctgatgatacgttaattaactgagttccctctacatccgaataatcacgtacaaatagtgtagaaagaatcgttaaggattctacgtttacacgtagcatggtttccactttatctaaattctgatccgtgacagaagaagattcaccaagcccggcattattaatccaagtctcaatttgatattcctttaaattgtcatacagtgtgtatgcctgagctgtgacagataagtcacttgtacgaataataacatccaaatcaggattaatattctgaatggttgatttaagctcttctaatttatctaatcttctagctacaataattaagtttttgccgcgagcagcaaattccaatgctgtctcatatcctatacctgagcttgctcctgtaataactgtgtacttcatattattctctcctcgaaaacaaattttctaattagttaatccatataacaaaatagattcagtctagtgtcgacaaagtcaaatcaataatgttttctaatttttccttatcatttgtcgtttttgctaatactcgtatccctacgagtgaattatgaataaattgagaaagccctttaatgtcatggtgtttagaaatttctccttgttcttgaccatgttttagcagatcaaataataatgcttccgcatttataaaaatctctgtgattttcttagctacttcttcatctattagggataattcaacagctgcattaacagctaaacatccttttggctgatcttcttttgggtaaataaccatttcaaataattttcgtatagccagcttaaccgttaattctgttttcacttcattcttcattcttacttccattacttctacatagtgacttaaggctcgcataaataaagtatgtttgtcgccaaatgtatcatagatacttctgcggtgaacgcccatatggtccaccaagtcttgcatggatgttttttcatacccctgttcccagaaaaggtccattgcttttcttaatgcttttttttcatcaaattctttatttctagccatgttatccctccttcattcttaaataattaaagaacgatcattctcatttgagcagcaaaacagttagatctgacgtatttcaagtatatcaaatttaagaacgatcagtaaagaatttagaattaaatcatgtgttttatatgctatgcatggctactacctgaattttaacgaatatcgctcctttttatttttcatcaaatcatttctttaatgtcattgacggcaggtcataaagcatactggtgtgttttcgaaaatacccctcatttcagtaaagttccccgctggaatattcacactttggacacgaaataggaactgtagaagagtttcccggattttcaaactaaagtgtattaaacaatacggaggattacactgggtaacacagtcaaataaaaaagctctaactaatccaaaaagttgctagtcagagctttttatacatatttttttggtccaactcactaagcacctactctgtcatcagcaacttgaaaaggagctttgataatagggacattatttgttaaaaccactcctgcgatgctgcccaataaaatgactgtaaacaaagtcaggctgatcttcattaataatctcccctttttttattttttcgtcccgctttaatctcagtcgataatactcattggaacgtgataaatcccctttttcaaaaaataatcagctgctctgattgcaaaattttcaatgtctccgaacattcttagaaggaagataccattagcgatgacactaatggtaccctttgtttctactcaataacttattcagcttctccaacaactgtaaagcgttcatttatatgttttggattttcaatttcatccaatactgcaattgcatagtctgcatagctgatataactttcacctttcgaattcacaagaagatgatcttttcctgactgataaaatccagttcttttcccgtctgggtcaaataccgctgaaggactgataaatgtccagttaatatcagaagtttcctttagttcttgcaagttacgaccttgccctttagctgtcggaataaaaatctccgggaaatcaggtgtatccattacactgacagttttattttcgtctacataaagactccctgctccacctacaattacggctcttgtacccgttccttttaatgccctaattaatgcccggccagcatctacatgtgcctgttcttctcctaatggagcaccgaaggcattaactgctacatctaacttttttagatcatccgatgtaagatcaattatatttttttcaatgattgcaatcttttcctctttaagttttgcagcatctcttacaattgcagttacttcatgtcccctgcttaccgcttctttcaagataagacttccagcttttccggttgcaccaatgattccaattttcaatttaaagtcctcctaatcattcaaaattttaaatgtaaccatatcgattacatgtaataagtttagttacaccttatttatttgtcaatacttttatcatcttgttaattgagcatattagagtaaaagaacttgtaatacattcagttacaagtgtactataaagagtgtaaagtaatgagggtggtgaagaaatcatgtctattagcagccgttttgctgtaggaattcatatattggctcttattgaaataaatgaagacggaattagcacttctgaatttttagctggaagtgtaaatacaaatcccgccttaataagaaaaattatggggatgctgaaaaaagcaggtttagtaaatgttcggccaggtattgcaggagctgaattagcgaaggatttaactgaaatcaccttacttgatgtttatagagcagttaatgttgttcaagataaagaattgtttagtatacatgaaaatcccaatcctcaatgtcccgtaggccggaacattcaaagtacaattggtccaatatttgaaatcgcccaatctgccttggaaaaagctcttgggcatatcacaattgaggatgtggtaaaggatattattgaaaaagaaaaattgaccaataatttttaaatgatttcacagaaaatcttttatcagactggggataagaaaaatggctttttgatgaaaaagagcagacataaaatctactccttttgatgaaagatttagattacggtaagggatataaatatgctcatgataaaaaattaacgacaatgcagacgatgccagattctttaataggacgtgagtattactatccaacaactcaaggttcagaagctaagttcaaacaaagacttgaggaaatctcggattggtataaaagaaaccgcaaatcttagtttgaacgaatatgttctgtatataaaaataatgaggtatggagtgaattgataatgaattatggtgaaataaaagattactgcctaacctttccaaactcttatgaagaccatccttttggagatggttggactgcaattcggcacaaagggaataagaaaatatttgcacttatcttcactcgcgacgaacacttatgtgtcaaccttaaatgcgaacctaaaagggctgattttttacgtggtctttttgaagaaatcaagcccggataccatatgaacaaggagcattggaatactcttaccttagatgagggactcccagagcatcaaatccatgacatggtaaagtacagctttgaactgacaaaaccaaaaagtaaaaaggaaatataacatcgaaggatagaacgctcattataattattcacccggcgcaatgatacagaggaatatgcaaaaaaacctcaaggcagcaatttttaaattcgtatttacgagatgattttttcgttattgtgagtcctttgtttctcgacataggttgaacaaataaaaaaagagcagactcaaagtccactcaattaatttagatgattgcttatttcatccagacacctataaaaattgaaaggtgacgatgatatgccgcaaaggtcatttagcgtttaattaatactgataactcaccttcaaacactttttcctctttctgattataggtagataacaatacagtaagtatccccgtctggcttttatttggttttttatcaataaccttaacaatagtgttcagtttatcattagggtaaacaggtgctaggaattttatattattcattcctgtcccagcaataatatcgtcttcatgacacccttcttcaatccaaagcttaaaagtaatagataacgtttgtattccagaagcaataattccattaaacctgcccatttttgctttttcttcatttaaatgcatgtattgtgggtcatacacttctgcaaaattcattatattctcttttgttaattcaaaagatttagtttgaaaaacctgcccgacggtgaattcatccaacttcataaataaatctccctgaatctaaactttattattaaatctacgtagcattttaacatactggctctcacacaacaacttaacggtaaaacgattgttcccctatcaggaatgaacaagcacattgtttttgtttccttgcctttaacctctttataatcaggtgttttcttataaagaccaaggcggtcgccatcaccatcacccggcatatgtgccatttcttcataagaatccccaagcttctcataataagaataagcagtaagcttgcgagaactttcttctggctgataaaacgcaagttgaatatacttcccgtcatcatatacaagaattatggcgttatctcttttgtactcatctgaatctgctcgcatttcttttctgactttcttctcctgcttcatcacttcattaatcattatcatatttactgccgccgcacgcagtcagcagaaggatgaaggtgactgacaaatcatacgacctactataagtaagtggacagtaacagataaatttctataaacaaaaaataccaagggtgtcaaaacccttggtatcattgatgcggccgagaggacttgaacctccacgggttattcacccgctgggcccaccagctatattcataaaactattgctcagttgtcagcatgttaagtaaattacgaatttccttgttataacttttaatttcttcttcattacaaccggttttatcaaatactgcattaggtatcattgtgactttttctttaaactcattccctacagttgttaacgtaataattacacttcgttcatcctcttttgaacgctctcttataataagacctcgctcctcaagtcgttttaaaactggagttaatgttccggagtctagatataattcttcgcctaaacctttaacagatattttttccttctcccataaaacaagaagaaccaaatactgtgattagcgtacaagttctcgttttctgctttggaccccatatagaaaataaaaagccagctctccttcgggagaagaactggcataataaagcttcttgcttcttattttgctgtattgctcggaccttttaatttctcttcgttcttgcgtcaacgttttattattaggacacaaccaataaaataatgacgatcgagaatagcaacgctgcttttgcaaagcagtaagccctccagaatataaaagagctgcagtcattgctgctcggataatcccagcttattctgagtctgtatttcgagtagccggtcaattaaatggatgtttttttcattccttttctgtttgttccattttccaccacagtgaatcttttggattttcaacagcttcttgaaactcagctttagaagcaactgttgggtaagaaccttttaaagatttacctgaagtatctttaaataaggttaacacaactattaagccaattaaactaactgctaataaatagaaacccggcgccaaattgtttcttgtcacatgggttaaccaagaagcaactaaaggtgttgttccaccaaaaatagaaactgataagttgaatgtccaggataatgtacgatatctaatgtccgtatggaacaacgtaggtaaagatcctggcatagtaccttcgtatacagataatacaatacctaacattaaaagtcctataaataagaatgttatattccccatattaagaaattgaaaagagataatcgaaaatacaattcctaatactaatccaattgttataacttttttatttcctaatttatctcccaatttaccaaaagttaaagcgaacggtaccataataatcaatacaattgctgtaaccggtgtacttatattatcacttataccaaggttctcatctaaataagaaggcatataacctaacaataggtaattggttatattgaaaaatgccacaaatacgatacataaaaagatatcttttttatatgttttaatgacttctaataaacctggttgttgttcttggctttcagagatgtcattttcaaaaattggtgattcatctaaatgacttctcaaatataaaccaaataatcctattggaatacttaagaagaaaggaattctccatccccaactattcatttgaacatcagataaagtccagaaaagtactgtaactaaaacagaagctactatataaccagataatgtgccgatttctaaaccgctgcctaaccttatacgcttattatctggagaagattctgcgatatataccattgcaccagcgtactctccacccacagaaaaaccttgcagaatacgagctaagagtaataatataggggcccatacaccaatctgatcataagtaggaagcacaccaattattaaagtagataaagccatcattaaaatagtaattgttaatactattttccgaccaaatttatcacccattttaccaaaaataattccgcctacgggtctaagtaagaaggcaattgcaaatgtagcaaaagtaaatattaactttaattcatcgttttgaactggactgaaaaagtttttactaataataactgccaaataagaatataaagcaaaatcaaaccattccatcgcgtttcctatccctgtagcaaacacgcttttcttcgctttttgaatgtctacaacgttaatttttttcttgttaaacttcatttaataatatcgactccttaattatcaaatccacattatacaagcgcataaaacggtccaagcatgcagtcccagaatgtatagcgtaatgcttctctaaaagtctgggggtttctgtttcacctgatggagagctaacggcatagtggatgattggttcaactgtaccttaaaagactagactaatatccatatcagcgccgaataacattgtaaaccaggaaagaaggatgaaattcagttttttcgctggtttccttaacttatttttgccgattggactaaaaataatacaaaaagcaacaaaaagagaaacatccaacagataataccagccaaagcggttagtgatatatccttgggctgtggttggcattttctgcagactatttggagaaatgattccccttaatacagctctattgtgaatattatcacattcgaaaacaaacttttatttctccaaagtatcctaaacgtttattttagttcttccattacggcttccaatatgtttattataagatcgaggtcgttcctaagaattatttactgattctatctttattaccccacaatcaggtgaaacaaaacactataaacgtagcatacctttttaaaatctgacaagcccaacagggtgatagaaacccggctaaagcccagctagtcaatggatagaagaaatttttttgtttttcccaaggaataaccgtctgtgtttaatctagcccaattagaaagaaaaagagcaggagtaatcctgctctttcattcaaaactttaatttgtatgaagaatttcgtataccttttcgactttctttacctattaatcagtatgcagactacaacagaaataagtagcaccgggtatgaaataatggatgcatttaaacaggccaatcaccgacaattgaatttaggaaaaagcgttaaattctctcttatgatgttgttacgtattgttgacggtaaaattattgaacatagatctcatgtggatgtgcatgatattctccgtcagcttggcgttaattaacaggaaaaagttgaaatagtgagagacctggtgaatagcttggtctctttttttataattaagtcctcgctctatgcccccctgcattcagtcgatgtaactttgaaataaagtttaattaacatctatctatcacaaacccttattttcacaacacatcatttgtttcagcttccctcgcgaataccggatcaatgctcagctttaagatagtcaaccaatttctccgcactgttcttaacatcttcttttgaaaggtgaagcgtcccatattgtgtaaaggcaggaagaaaacgcattcctacatatttagcagtgacttgaaacggtctgataagctcgctgatcgtgatattatattctccgcctgcttgataatcagattcctgtgcgcctaaggagatcgctaagagcagttcttttccatgcaatttagtacctccagttccataagcccagccatgtgttaacacatcatcttcccattgtttgagtaacgcgggactgctgtaccaatacattgggaactgaaaaacgatacgcccatgatctaacaggagctgctgctctttttctacatcaatgataaaattagggtattcaccgtacaggtcatgaactgtaatgtcattctcttgctttaaacgattcatccaggttctgttgacaacagacgtttccaaattagggtgtataacgataactaatgttttcatttgaccgttatcctttcttcgcagattagttattattgcttttgtgataaagaattgattctaattttaaaataacaacttatttacacctattttatcctttttcatgaattcagggcaactaattggacaccgattacatttatagccaaaaaaaggcttagccttttaaaaaagattaagccttttcagtacccttatgcccctaccctattatctcgtgtctaatttctaatagctgatcatataacaaggcatctttgttttcctccatgcttagcaatactttctctacttttgcaaattggagtttgaggcattagtaactacctataatgatgaaaatatttgtgcgatgtctactgcagatgacttactttaggtaagcgggcagattgtgggcagtagatcatttaaaaataagcacaaaaaaataccaaggatctctctattacccttggtatcattgatacggccgagaggacttgaacctccactggttattcacccgctgggccctcaacctagtaaaaacctatcatgagttacaaaaaacttttattcaaagcatctgtttattttatttatacttattttcatcatttttcatgaattctgagcacaaactgggcacctattagagaccaaggaaatctgcatttcatcaagaaatatgcactcatcgccctgctgtaattagtttcacatcatttatttcagcttccctcgcgaataccggatcaatgctcagctttaagatagtcaaccaatttctccgcactgttcttaacatcttcttttgaaaggtgaagtgtcccatattgtgtaaaggcaggaagaaaacgcattcctatatagttagcagtgacttgaaacggtctgataagctcgctgatcgtgatattatattctccgcctgcttgataatcagattcctgtgcgcctaaggagatcgctaagagcagttcttttccatgcaatttagtacctccagttccataagcccagccatgtgttaacacatcatcttcccaccattaatttaaatctcgtaatttcatttttttcagattcccattgatacatattcttgcaatgttttaatgtcgtttactaaaattgaattgagtaagggacccatctttcaggagttccacccatcttttcgtaaaaacgctgagctcgtttattatcatgagcagttagccaaaacatatcagcatagtcattgtctttagaaaatttttcacatgctttgaagaggccattcgcagcatctgtccccctcgcatcttccaaaacgtataaatcatttagtacacttgttgtttgtgcaaatagtgtattgtaagtgaaatataatgtagcaaaaccaactagcttatcattttgttctgcaacaaattggataccttctttttgattaagaagtgtataaaaaagttggtgaactttttcaattgaaggtttcggtctctgataaaaatcaacgatatattcatacattatctcagttaattggtcaatatccttagcttcagcttttctaatattcgtagccattacaaatcctctccccttttaatatgtttttatatttatttgatttgtattaaaaagttgttgctaactttctcgcatctgatatacctttgtgaataatttctttcgcttcgtctcgattgaattcatgtccttcaacatataatactgctacatcctgtataccaatgatattaagtacatgttttaaatacgggtggctataatccattttcgcaaaaggttcatgcgagtaaaccccaccactcacctgaatgtgaatagctttttttccttttagatgaccaaccggtccattctcagtgtagtgaaatgttttccctactacaacaaaggaatcgatgaaagctttcaattttggaggaatcccccagttccacataggagatacaaatacaaatttatcagcacttgctaccctgtcagtgaaattattgagtgcgttaattttatgcttctctacttgccttaactctgaaccctcatcccgcaatttgtcccagccattaaggatatcttcatcgattattgggaattcatcttcatataaattaattgtcctaatttcatcccctatatgagattcacgataagattccagaaacgcacgtcctaccctatgaccaactgaattttcaactgattttggattagcggtaatatataaaattttcgacatattaagtctctctcctttgtgaagaaattccatattaatgaaaaatccaaggctttaattatgaagttacactcgctctgaattattaagtgactaataatttaaaaccaatacgccaagatggataagtgggcttccaaccatattctcttttcgcttttccatttgaggccccacgttttcctcgttcacttccatctataaatattggttttggtgctccgatctcgctcgcaaatagcgtgagacattcttttcccgtggttggttcatcatccacaatattaaccggtccattcggccagtttaatgcttcaactgaggcttgtgctgcatcttccacatgtaaaaatgatgtgatgctatcatcggctttaatttctccttttaatacctgccgaccaatcattccgtttttttcataccatgtacctgatccgtaaagcagcccatgccgcaggatgacatactcgggtaattcagcaactgcggattctaatgatgccactccaattacatttattttccttgaattcggcgcgttgagatctaaagggacatcttcattggcaggtattaatccgggttcataggccatagaaaggctttgagcaattatcctcttcactccaactttatgacacgcatcaacaatatttctcgtacctataattctgattctcgcgttttcttcaagattgtaacttgttaaagaggtaagctgatggacaacaacctcaggttgaattttcctaaaaacattaagaacagcatctcgatccattgcatctgcttttacaggagttacccctattcttttgaggaacgtgttcgaccgattacctcgggtcaatgcaaatacttgatggccgttttgtattaatttaggaagaagggaccgaccaattactccagtccccccggcaacaatgatcttcatgctatttcttatttacctgctaatcttgaagcagcttcttcaacttctttatttgctttttgtaaaacatcctccggacatagtaaagctgttccttgcactcggataatttgataatcctcaataccgaggaaattgaacattgatttcaaatatttattagagtattcaacttcttcataccagtcatcatttgtataaattgatccgctagcttgtatgacaagcattcttcgtccatctttaagcagacccactgacccagtgtcagtatatttaaatgtttcgcgtgcgatcatgatattgtccatatagtcttttaattttgatggaatattgaaattatgcaaaggcaaaacgatgacatacgtttttgcacttttgaattgtttcaatacttctgtcatgcgttctgttactttttgttcatcgcttgtcagttcttcgccctttccagccttatcccatgcgcttaaaactgttttatcaaccataggcacttcatcactatacaagttaatctgctcaagctcttcactctctggaattaattctttgtaaatttccaaaaagtgtttcattacccgtaaactatatgacaacgtatcatccacttttggatgtgcattaatgataagtgttttgctcatttaaaactctccttttattttatattaaagattaatttaatcgacgatcaactcggtctttaatataaaccctgcagtttattttgtcaaacggaacaaatcatatactaaagaagggttttatgattgactatcaccaaaaatactcctaagatacaatatgataacccttaaaatcaaaagcaggtgagtttatatgcagtacagtgttggggttgaatatgctttacattgtctggtttatttaatagatgttccctccaaggaaagtgtcgggattcgggaccttgcagagttccaaggactttcagaaacatttctttcaaaagttttcggtaaattatctaaagctggtattgtaaattctgtccctggtgtaaagggaggatataggttagcaaaatccccagaagatatttccttttgggatgtaatagaggctgttgaaggaccaaaacccatttttcaatgtaaaaatattgtaagcaatggtctgctttatcgtgacaaatgcaactcctgtgaatccagcaattcttcttgtacaattaacttggtaatgcttgaagcagaagaacagatgcgtaattatcttcgtaataaaacgctcgcatggttaaataaagaattggacgtagtattgcctaaaaaaacaaggacagatactcgggaatacttcataaaaaaaagctctgactaaattaattagtcagagcttttttgtgcttcaagatgcctttaaattacaagtcatattatgttttttcgttttccttctcggcgtttgaatttgtaaaaacaatgccgtacgtattggtgcttctcttgcataagaaagcgcaaatgttatactcatattaaagactatattaatcgccgatttatacggtctcttataaaaaagaataacaatcttcttttttacagattaatttcaaaaaaggaaggagaaatgtaaaatgaaagcattaatgactctgtatcttaggctcgctttaggaattagctttttatcttctgtagccgatcgattcggactatgggggacacctggcaagcctaatgtcgtatggggaaacattgaaaattacacggattatgtcgctgccttaactccttttataccaaatgctcttgtaccaatagcaggatggatagcaactatgtttgaaaccatcttaggaatacttttgatcattggtttcaaaacaagaataactgctgtattgagtggtgctatgttgattattttcgctctaggtttaacagtaggaacaggttttaagacttctcttgactattctgtattctctgcatctgcaggtgcattcatattaatttattttaaaagagtaccctatagtatagatgctttactcatgaaaaaaactgtagaggctgaatcattttcacttgagtcagacaaatagccctcaaacctctaaaagatagggaaagaaatatcgaagcataaaaaaggagcagacataaagtctactccttaattttcggtttccttccctttaacttcttcataatcaggtgttttcttatacagaccaagtcggtcgccatcacccggcatatgtgccatttcctcataagaatccccaagcttctcataataagaataagcagtcagcttacgagaactttcctcaaaaaaataccaagggcgtctgcaacccttggtatcattgatgcggccgagaggacttgtacctccacgggttactcacccgctgggccctcaacctagtgaaaacgtatcatgtattacataaaccttataaataaagcattctttatctacatttccacttgttttcttctttttttcgggcaaaaattaggcattactttttttaaaaaaatcactgaaaatattagctttaaatttgtaattccagctaagatctaagaaaccactaacaaaggaagtaaggtggtctcgcccaataggtgcgatagttttttcttttggtagtatcttgacttgtccgattttgagtaaaaaagagtacgtattaatcttgaatagaacaaaaaacactacccttttcgttactttagagaaaggatagtgttttttggttttgcgggtatcggaaaatctttagtagcagtacctcaataaaagatcgcaaattccacttacctagctatatcaaggcttacttgtctgatttgggatgtatggggtacaaaagttgagttacaaacattattatccaaaagaatgtttactgtaattattttacatggtattatttgtatcatgcatacgaaatatgtatgtataataaatgaaattaaaaggagtgcttgatcgtgaatcttaagtccattttcaaaggagtaacatcgactctgatagctggtgtaattgttggaacttgtactatacctgcttttgcggagtcgactacaagtgtatcgtcgaaaaattatgcagttacaagtggagtattcaaagctctagatagggaaatttcagagggttctgttgatcaatcaagctggagtcgggagttcgaattagatgagaatgacggagcacaagtaaacttctggatttcaaataacggaagtaatgacataaaaatatcaattgatggaaaagtctcaagaaccatcgcaccaggcaagcaaggcaacatttctgccgaggttaaaaatggttggtttggttggacatacaattacacatttacagcttcaccaacggctcaaggtggtagtgttaagatgaaatataaaattgctcaaagaaataattaacgaattacggaaaggtaatcacttattacctttccgtaatttcatcatttttttagttttttaatagattccttaaataaaaggtttttgtattaaatcctatatgatgcaaatcaaaccgattagtaattacttttctccaattttcttctcctgcttttcctgctcttttcccctcaaccttacgagtattatcatgtcctatatttaagggttatacagcgctcgttatcattatttacaccttttttgatgttttttcatattttctggacagtaaatgggagtaaagagaccttgaccactcaccaagataagtaaaataaaaaacgaagggcatcaaactagatgacttactataagtaagtgggcagtaacagataaatttctataaacaaaaaataccaagggtgtcaaaacccttggtatcattgatgcggccgagaggacttgaacctccacgggttattcacccactaggccctcaacctagcgcgtctgccattccgccacgaccgcgtgctatgaagctgtctttccactaagcatataagctagtgatgatgatcagcactttgaaaagaaagtgcgggtgaagggactcgaacccccacgtcgtaagacactagatcctaagtctagcgcgtctgccaattccgccacacccgcgtgacaagtggtgagccatgaaggactcgaaccttcgaccctctgattaaaagtcagatgctctaccaactgagctaatggctcgctctaaaagtgattcaaaaattttaaataaaatggctgggctagctggattcgaaccaacgcatgacggagtcaaagtccgttgccttaccgcttggctatagcccaacgaaggtaaatggtgacccgtacgggattcgaacccgtgttaccgccgtgaaagggcggtgtcttaaccgcttgaccaacgggccgtctggttgagaacttatctggcggagaaggagggatttgaaccctcgcgccgcttacgcgacctacacccttagcaggggcgcctcttcagccacttgagtacttctccatatggctccacaggcaggattcgaacctgcgaccgatcggttaacagccgatagctctaccactgagctactgtggaataatcagactttctttattataaatgatgcgacatattgtgtcaagaagcaacatttatttttttaagaaagtgtcgttgtctctcaacgacttttataatttaacatagaacattaaaatgagtcaagcctttttaaaaaattcttttgatttttcctctgcactttccgcaggcatatctttccggattcattgcccgcttctttatatactgttggccgcaggccgcgcatctatacatatatgttttcttttgtgtctttttggtttgcagcggcgtgcagaatctcggcgctccgactttctgaagcaggtctctgaaatctttgtctctgtgcttgtacccttttccttcaaggtgaagatggtaatgacacagctcgtgtttaatgattccttccagctcgctctgcccgtgttcgagaagatattttcggtttaattcgatgttatgggaagacagcatgtaccggccgcctgtcgttttcagccggtcattgaaaaaggcccggtgacggaacggttttccgaaatcctgtgcagagatgtcttccgtcagcctttgaagttgttcgttatccataagtgcaccccgctttaaaaacattgaacgggacaattcaccgttcgcatacaatgagttaaaaccgacctctaactaaaagctgaggaggaatgagccatgccgaattggctgatgaaacaaatgcaaaaagcgtttttagaaaaggacaattaccaaattaaactgctgaatcagtgctggtatttctacagaaaaaaacactgctcgtaagcagtgcttttattttaccatagacagcgacactctgcctttttgcacgtccaccccttcgacccatacggtgacgatgtctccgaccgatacgacgtcgagaggatgtttgacgaattgattgctcagttttgaaatgtgcacaagcccgtcctgcttgacgccgatatcgacgaaagcgccgaagtctacaacgttgcggacggtgccctgcaattccattccttcctttaaatcctcaagctgcagaacgtcttttttcagcaaaggcttcggcacttcgtcacggggatcgcgctccggccttgtcagctgcccgcaaatatccgcaagcgtaatttcccctataccgagctcttcagccgtttcagacagcggcagtgcgctgattttctcttttacgtccgcgcttccgatctgatccgcagtgagctgcagttttttgagcagcgcctttgtctctttatagctttccgggtgtatcccggtgcggtcgagcggttcctgtcctccgggcactctcaaaaagccgatgcattgttcatatgtttttgcgccgagacgcgggatttctttcagttctttgcgatttgtaaatttgcctagttcatctctttttttgacgatattgccggcaacggttttggataacccagctacatattgaagcagcgcggctgatgctgtattgacattcaccccgacttggttgacgacggtctctacgacaaaacggagagattcgtttaattgcttttggctgacatcgtgctggtattgcccgacgccgacggatttaggatcaatttttacaagctcggccagcgggtcctgcaacctccgcgcgatggagacggcgctgcgctcttcgacctgaaaatccggaaattcttcacgggcgatttctgacgcggaatacacgcttgctccggcctcattgacgatgacataataaatgtcacgctctgtttctttcagcacatcaacgacgaattgctctgtctcccgtgatgccgtgccgtttccgatcgccacaacctcgacttcgtaccgatccagcaattctttgatttttttccgggcttccgctgtcttttttacgggagcgtgcgggtaaatgacgtcgattttcagcacttttcccgtctcatcaacaactgccagtttgcaccccgtacggaaggccggatcgacgccgagcacaactttccccttcatcggcggctgcagcaggagcttacgcaggttttcagcgaaaatatgaatcgcctgcgcgtctgctttttctgacagctctttgcggatgtcgcgctcaatagccggctggatcagacgtttgtaactgtcctcaatggcctctttcagcgtttctttcacaggcgtttcacggtgtttgataatttgcttttctaaataagcttttatctgatcggcgggcggttcgatcgcaatctttaaaatgccttctttttcaccgcgattcatcgcaagcactctgtgaggaacgaccttttggatcggctcttcgtactcgtagtacatttcatagacgtttttctcgtcatctgcggctgacttgcctgccgcggaagtgagaattccttttttatacgtttcctggcgaatccactttctgaaatgaggatcatccgagatttgctcggctatgatgtgcttcgcgccttcaatggcttcctctcttgaagcgacttctttttctgcactgatatattgatcagcgatgtcgtgaaggcggttttctttcgggagagaaagaatatagtccgcaagcggttcaagacctttgcttttggcgacggtggcttttgttttccgtttttgtttgaagggacggtataaatcctcgacttcctgaagcttaaccgcttgttcgattttttgcttcagcccttccgtcagcttgtcctgctcagagatcaatctgatgacttcttctttccgctgcgtcaggttttgtatgtattgccaccgctcggagattgcctgaatctgcacctcgtccattgagccggtctgctcttttcggtaccgcgcaataaacgggacggtattgccgtcttccagcaggcggatgacactttcgacatgtttttgggataacgctgtttcttcagcaatttgttttttcaaaagggctaacgtttccatatcacaaaagcctccatctcttcattctttctctagtgtatcaaaaaacggcggaacataaaaaaagcagccttacgataaaagctgccctagaatataggtcaaatcatcacgtctggatgttgtgtacggatgaagtgattttgatatatcttctattgagtgtccctgctttaagcaggtgcggatatgcggaacctcaagcccatccgtgtagatgatgaacctcgcccctttttcgtatgatgacgtatacgttttgtatctttgcggtttgcctgagaggtaacccgaaatcggcagcggatgaaagacttcgcctgatggggagtgcaagaagaaacggacgttgccgatcgagcagtatgtcaattcccttttgatgaaattgatttttaagatggaggcagtcgcccctcttttgtttttcatcgcttgattgcagcgctcaatgatgctttccacatcctcatccgcatacgtttccacgatgtctttaatggctgacgaggattcgttggcaagagatccgctgccgagaccgtccgctaccgcgcaaactaattcttcttcattcgccttcataaaaaagctgtcgccgcatatggacttgccttctttatttaattggtatacaagagtttgaacatgttcattttcttcaacctgaatcattacattagctccatggagggatctccaatcaaggcctctctcagttttttcaccgctttccgctgcaggcgcgagacgtgcatttgagatattccgagaatgtcccctgtttctttttggcttttattttgcacaaatgttagatcgataatctgtttttcgcggtcggacagcacatgaagtacgcttttgatcatcatctgctggttgacgcgttcgtatccttcctcctgcgaaccgacgatatctaaaatcgtgacggtgcttccgtccgcatccgcttcgatgctgtgatcgacagacagcgcctgatagctttttcccatctccatcgtttcaagcacttcctcttctgacacatcgagaaaggctgcgatttcttcgactttcggcgaccgctgcgtctctgtcgtcagctgatccaccgccattttaatgcgcggcccgagttctttaatccgtctcgggacgtgtacgctccatgttttatctctgaggaagcgttttatctcgccgatgatggtcggaatcgcaaatgcttcaaaggatttgccgacctcgggatcataccgtttaatggctccgagaagtccgatcatcccgacctggcggaggtcttcgtgaaagctttttccttttgaatatttctttgccagcatttcgacgagattggtatacacctcaacgagtgtttcctgggcttctttattatcatgtgtttgaaagtcgcgtatgagccgatcaacttcatctttagttagtttcgtagtttttgatggttgtgccatgatcaactcgctccccatttaaatactttgtcatcgccacggttacgccagagttgctttgaactttgacttcatccatgagcgtttccattaaatacagaccgagccctccttctgacaattgatcgactgtgtgcgaaggagtgtacggcccgagatcctgctgcttctgatcaaaatcaaagctgtctccctgatcggcgacaatgacctccagccgatcctcaaacacaccgaaccgcacggatacttctcccttattttcatcgttgtatgcatgctggacagcgtttgtacaagcttcgctgacagcgatttttaaatcttcaatgtcatcataggtatagcccattctgcttgcgacccctgataacgtaagcctgacgattcctacatattccggttcggccggaattttcatctctatataatcaactgatgtactcattgcacgccaccttctgactttgccgaaatgtcgatgatgtccttaagccccgtaatttcaaacagacggacgagccggtcggaaagattctcaagcttgagagagccgccttccttgctcaccgttttaaacacgcctacaaaaacgcctaaacccgtactgtccatataatttacatcttttaagcagattctcatgtccttcccctcgtttgccaggggcatcagcttttcacgaaccaccggagctgagtatacatcgatttctccagcgattttgatttgtatatctgaaagattctccttcatatctaccgttaaattcatcgtatcacctctgaaagttatccttactcgtgctaatggctttttacccgtgctgccgtttttttaaacctttcttttcaaaacaattaacgtaaaatcgtcatgaagctgaaagtcctggagtctcagcaggctgtcgtaaatatttttgaccatatcctgcgcggagcagtccatatgttcttccagcatgcgctgaatgtcgctgcgttctaagaaaccgttttcggtacggcattcggtgacgccgtcagaaaaaagaacgatcatgtctccttcgtccatgtgctgttcatattggctgtaatcaaaatcctgagaaattcccagcaccaatccttttgcctccagatcataaaactttttttctttttcagagtagtagaagcccggttcatgccccgcagaggcatatgtaaattggtgatttttcgtattgtagtttgcgtaaaacatggtgataaacatgcttgaatccacgttctgttctacaacgcggttaagatttttcagcacttgggaggggtgaatgccgatctccggaagagagtccatggcatacttgatcatcgacatgcacaatgcggcgggtattccttttccgatgacatcggctatcgcgatgttaatcgattccttgtctttgacaaagtgataataatccccgctcatctgtttggcggggacgctgatcgccccgatatccagatcttcttcttcaggaatttttgtgccaagcagcgtctgctgaacatttgcggcaatttcaatttctgaacgaagctcctgctggatatctctcagactttgatgttcctgataagccatcccgtagccaatcatgacttctattaaaaaatccagcgaatgaaaaacatcttccggcagatccggatacagttcctttactacttttcggtggatactgataatctcctccggaggaacctgatgttcaatcgtttttcggctgaatttttgggcttgatataaagatgtttctgttaattcggctatatatcggctaagcagctgatgataccgctgctctataacctccctgaaatccacgttctaacctcctaccgaagccatttcacggcttgaatctctgttccttcctctgcaacagattgcaggctgaattcgtccatcagccttttgacgcccggaagtcccgctcccagtccgcctgacgttgaaaagccgtcttccatcactttacggatgtcggggattccgggtcctttgtcttctgctataattttaagaccttttttccctctgtcgtttacttgttctatgctgacctggcctttgcctgcatataagtaaatgtttctggccaattctgagatagccgtcgtgattctggcctggtccaccgtgccgaagcctaattccttcgcaacgttgcggccaagctgtctggcggctacgatatcccattctgtcatgattttcacacaggattggtcgttcatcgctattcccccaattcccgcttcaatgtctcaagcccttgctctaaatcgagcgccgtttcaatttcctcaagtgagattccgagttcaatcaatgtgaccgccacagcaggctgaattcccgtcaatacgacctttgcgcccatcaatttagacatggtgatgacatcgccgagcactttcgcgataaatgaatcgatcatgtcaacggatgtcaggtcaatgacgaccccgtttgcgccggtttcatagattttgttcagcagatcttcttgaaaatgcaaagctgtctggtcgtcaagttcccattggatggataccaataagcagttatacagtttcaggatcgggatttttggatgtctcacaatgttattcccccaatgaaacgatttttcgatttgtcatttcaagcgctgtttgaattcctttttgaagggtattcttcgtaataacctgcgacaaatcaattcccagattaacgatcgtctgcgcgatttccggacggattccgacgagcaggcatttcgcgccgacaagccgcaccgcttctgatgcctgaataatatggtgcgccaccatcgtatcaacgaccggcacgcccgtgatatcaattaatacaacctgtgaacggtgcttcacgacgccgtttaacagattttccataatgtgctttgcacgctccgtatcaatcgtcccgacaagcggcatgaccgttacatgctcaaataccgggatcagcggagccgacaattcctgaagcgcgattttttgcaaagtaaccgtcttttcccaggagatagaatactgatttaaaatttccgtattgatcggattgaaaaagctgtctatttccaaaatcaaatctgctctgtcctgatcggccatattaaggtcgaccatcgtttcgtaaagcagtttccaaaactctgacagggtggctgaaagaagtttcagtgacaggccgagctgaacggcgcgcagtgcgagttcactgatctgctcttccgtagcctcgtcatttttagtcgataataaaagaatgtctatatagtctttacaaatattttcacatatgtgattcgtaagctgatagtcttcctgattgcctacttcttttagtttggctgtccaagtatcaagcagttcatcatgctgatcaatgatgaactgatacactttctgattcgacatgggtttcactgacctcccgacacaaaacaacaaattttgtttgattatctctttattatagcgcttatgtttttcgaaaacaaaaaaagttgctctatatgagcaaccaaaatatgactaaaaatcaatgagtgccaaactgatttgcagggcttcatcaaccttatccatcatttcatcatccagatgagttattttatccgttaatctttgcttgtcaatcgtccgaatttgctccagcaaaataacggaatctctttcaaaaccgtagcgttttgcatcaatttcgacgtgggttggtaatttcgctttctgtatttgggctgttatggctgcaacaatagcagtcgggctaaagcgatttccgatatcattttggatcactaaaaccgggcgtacgccgccttgctctgagccaacaacaggagataaatcagcaaaataaacatcgccgcgctttacaatcaaaatgattatcctccgctgactaagcgctcaacggtcgtttctgcttcgcactcagcatagtgagcctcagaagagatattcaagttgattttcgccatttccatatacccgcgtctcatcaaatcacggttatggcgagttgtccgttcgctgacatacgctctcactgcttgtgatatcagttcgtttctgcttcgtttctcccgcatcgctacaccatccaattcagctactaagttttcgggcaagctgattttcatttcggttcttgcgctggattcagacaaaaaacatacacctccaccaaacttacggatacgaccaattcatccatccagacataatgataccattattcaaacgtcaagcaaagctgttttataaattctctttttccggatgacggctacttgcttgtattatcttgcagtaaaggatttcttacttccattatactctcattttccaaaaacatacggggaacgcgggaactaatggtacaagggacctcgtaattaatcgtcccaagccgcccggcgatttcatccatcgtgatcgtttctcccttctggctgccgatcagggtgactttggtgcccggcggataagattgatctaattcgaccatcaattgatccatgcagattcttcccgcgatgttcatccgtttgccgccgatcagcacagacgtgccgctcagcttgcggagccacccgtccgcatagccgatgggaaccgttccgatccattgatccttctctgccgtatatgttgcgccgtagctgacgctttcccctttgcggatctttttcacatgggataaaacagagtgcagcgcaaaagccggctttaattgaaacggaatttcgctttggatgtcagcagaaggacgaagcccgtacatactgatgccgaaacgaaccgcgttaaagaagccctttttaagacgaagtccggcagcgctgttcgcgcagtgcaccatcaattcttttaaagggagcggagcgatcaatgttttaaagcggtcaaactggaagaggaaataatctctgtttttctcatccgcggtagcaaagtgggtgaatacgcctttacagactaaaccgggattttggctgaggatttttaacacgctttggatttcttcctccgttttgactccgagtctgttcatgccggtgtcgactttcagatgaaacggcactgtttcacttccgaggtggcgcgcagcttcctgaagccattcaacagaataccccgtgagtgttacgtcatactcggcagctgcttgtacatattcgggcggcacggcgccaagcacgagaatcggcgctgtaatgccccgttttctcaatgaaatcgcttcatccagtatggctacggcaagacaagaggcacccgcttcaagcgcggctttcccaacttccaaatctccgtggccgtaagcgttcgcctttacaaccgccatgagatggacgttttgcccgatgtgttttttcatatgcgtgacattttctttaatcgcggacagattgatttccgcccacgtttctctgtaaaaggatgctgtggtcattcgatacacttcctagcattattttcaattcatattgttattatcatactaaaattattctgcaaagtgaaatggaatcaaaaaagagaccgacagcggcggcctcttttttgacgttattttgacgactgtccctgcatgcttttggcggcggccaccatttcatcttttgtcagatcctgtgatgacagaagataatccactccgtcatatgtccacgttaaagacgtatcagataatgccgcaaccgtgaagccgagattaaccggttcgcctttcagcgtgacggcagaggcggcttttgcgatatgagctttttcttgaataagggtgaatgatttttctccgccgtaagtcatgacgatccgtttgccgtccgccgttgaaatatctttctcttcaagctttttgacgccggccggcacttgaagcggtgttttgaccgcaaatgaatcagacggcttggcgcttgtggcgacgtccatctgggaaagcgtcatatttttcttctcgtcaaaagagtctttatcaaacggcttgttgaattcaaagcttttgaattcgacttttaccatcactttccggtctgtatccatgactttgacgagcgacgggctcatgtcctttttgttgaaagtgatttcctgagtcggcagcattttgttgtgctgatagtttgtttttgtttcaaacgtgtactttttatctttggcggaatagacggcgtctttgtcatgctgcacgtcctttacaagtgactcaaacaaatatacttggctgctgttattcggccagtcgctttggaatctgaagctcttatttaacgacggcgtgaggacaaagactccgttggcgttccgtaaaatgacttggttttggtcttttttcggattttccagatagacccggtacagggaaggttttttatgccagatttccacattgtatacttgcggatcactccccgtttcgatggtcattttggctttcgctttgtacgaggtgtattctttcgccttcttatctaaaccgttcacgatatcttcctgtgatttttggccgcaggccgaaagaataaggacggcaagcagtcccgttaaaagcaaaacaaagctttttctcaccttttttcaaccccttcttctcaattgatgtaaagggaagaaatcgcttgtttgactttaacggtacgccctgaacggacggacgcgtaccataaaagcctcaaacaacttgtctcccttaatgcactatcaaatatatgaaggggttccggctaatatgcagactagcgtgacaacctttcaatcacgacctgtgccgcggcgtattcttttgtatgggtaatggagacgtgaaccgccgcgccgtcaagcttggcgcaggccagcacaggctttcccgctttgtcgtttccagtttcaatatcctgaaagctgagctctttgccgatacctgtgccgtatgctttcgaaaaggcttcttttgccgcaaatcttcccgcgagaaattcaattttccttttgtccgacagcaatgtaaaacgggcgtattcagcctccgtcaatattctttgcggaaatcttgcctgccggctgagcatgttttcaattctgtgcagttcaacgatgtcgattccgattccgaaaatcatgtgaattcctcctaaaagtccgtactaaaaaacggtttatgtcataaacgtgttactatatatgtaacaaatcagatgcaaaggggcttgcgatgtttatacgaacggaaaatttccagacttttatcagacgttatccggccgtcagctgtatcttggcactgcaggcgttcttgtggctgtttttcagtatgccgcttcattccgtcatgatgtggtcagatgctgtgaccggctataattacggcgtttcctcgggagaatggtggcggctggtgacaccgatgtttttacacgcgaatttcactcaccttttgtttaactccatgtctctctttttattcgcgcccccgcttgagcagatgctcggaaaagtccgttttctgattgtgtacatcgcatcgggcatcatcggcaatatcggcacgtatcttgccgaaccgcttgattatgtgcatgtcggcgcatccggcgcgatcttcggacttttcggcgtgtatgtgtttttgactgttttccgcaaggagctgatcggccgggatcagtcgaaaatgattatgaccctgcttatcatcgcggtgctgtcgacgtttatcaactctaatattaacattatggcgcatttgttcggactggcaggcggatttttgctttcctttttatgcgtgcagcaaaaaaagcggcggtattaaccgtccgctttttcatatgaataccagcgcccgatgcgttcggcatcttcctcgctgacatccttcagcatgacatgctccatgtggtgagctgatttcactgcggtagccacagatgcgagccgccttcttttttgcagaaaggagcggctgacttcaaacatctgcattcttcttctcagcataatcgtggtcgtcttcccgaccagcctcgtggtgatctgaagcctgccgccgtttatgcaccatgacgctgtcctaaacgaggcatatccaagcaccagttcgacgggaagcacaaggagcgatgcatatccccacggtttaaacagaatacaaagcgggatgatcacgaaaaccgagaagattatggatcggaataaataccggcgcagcgcccttttcggcaaatgatttcggttttcttccagcacgtaatccggtgtgaaaccgttcagcatcactccgagctttgatttgcggatgatcggaaacagaatcgtctgagctccttctttctcattccccgcactgccggcgctgacaatcgccaccgtcgcgtatccgaataattgcctgatcacattttctttcattttaatggcttggattttacggagcgggattgtcacttgatgtttttcaataattcctctggtaatgaccaattcgtgttcctttttttctatcttaaagttggcatgcttgatcatcataccggcgatgcttaacagccaggcgatgaacaatcctatgaaaatgatcacggcgtatataccgatgctcgcatgcttgagaaaagaaaacctgtcatagagccagtccatcggaagtacttcatcaatctgagaaaagagggcgaataccgctgagatgatgacaccgattcccccggatgttgaggcggccataagcagctcacctacagacagtcggtaaacggattgcacatcttccccgcgcatcggctcctgctccgctgcggtctcccctcgttctttttgctccgctttttgctgaaaaacagccgctctgatccgttccgcctcttccacagtaatggcggataagacggcctcggcgtttttcccgtcgccggccgtttcgatttgaagcttaacaagcttaaaaagctgctgaatgatgccggcactcgtattcattgattgaatccggtcaatggagatgtatctctttttcgtaaaaaacaagccttcttcaattctgaattctccgtcctcaatccggtatgtaaattttctccactcgatcacactagccgtaatcagccagataagcaggacggcgagcgcaatgcctccgtaaaagcggatgaagtggttggagtttacaatatagacgagaaaaaatggcagaataatgtttttaatggtttcgataataatatggaataagttcaaaatcacggccgccgggtgcagacgtttcggctcagacatcatcttccgtcacccttgccagacgggaaatggaatccctcagccggtcagcttcctccatatcaagcgccggaatggaatgaacggttgccgccgtggagattttgactgaggccagacggtaccttctgaggagcgggccttgtgaagtatctacgtgctgcaccctcaccatcggcacaatgacccgtttgacaataaaaatgccggattgaatatcaatttcattttcatggacttcatagcgccagatcctgtgcctgattttcggtatggcatagacggatatcactgaaccgaatatccaaatgatgccgaggactccggtgatccaatacggccaatggaagaaatggcttaaaacagctgctgctataacggccagaagacagaaggcggacaggatgatttcctgaagacgccagacttttaagccgcttggactgattcgattttttggctgtgctctcaacatacctacctcccattttttatcatacatacaaatacggctgatttgcaaaaaagattcactttccggcatatcaaaaaaaagcggaccccgtacaagggtccgcttcctgtgttttagtatgattttttctggcgtctgtcacctgaagaacggcggtcgcttgagcgttttttatcgtaggaagaacggttgttggttttccctttgccgccgcggtagccgccgccttggccgtctctgcgcttagaagtacgctggtttttatagcgtttgctgaccatcggcgcttcatcagtgaggcgtacaggcgtgctgtccggctcttttgtcgccattttaatggctgcagccacaactgtcactgcatcatgatcttctaacaattccgcagctgccgtcatgtagaagttcaggttgttttcgctgatcgccgtgcgcagacggtcaaccgtcacctgctgctgtccttctaatgcttcgtcaagcgtcggctctttcatacggtccattttgcgttttgtcgtttgttcaatcgcgcgaagcatgcttttctcacgcggtgtgataaacgtcatcgccatacccgtttttcctgcacgccccgttcttccgatacggtgaacgtagctttcaggatcttgaggcacgtcaaagttgtaaacgtgggtaacgcctgagatatcaagtccgcgggcggcaacgtcagtcgctacaagcacttcgatcgcaccttctttaaatttacgaagcgcaaccatacgtttcgcctgcgttaagtcgccgtgaattccttcagccgcatatccgcgaaggttcagggcttcagcaagctcatcgacacggcgtttcgtacgtccgaatacgatcgcaagttccggagactgaatgtcaagaagacgagtcagcgtatcgaattttttgcgttcctgcacttccaagtagaactgctgaatgtttgatacagtcatttctttcgcttttacttttacgtgttccggctcagtcatgaaacgctctgcgatccgtttgatcggcgcaggcattgttgctgagaataagagcgtttggtgctcgctcggcacgtttgagagaatggattcaatatcatcaatgaatcccatgttcagcatttcatcagcctcatccataacaaccgtattcacgttgtttaaacggatcgtgcggcggttgatatggtcaagaagacgccccggcgtacctacgatgatatgcgggtttttctttaatgcgcggatctgacgtccgatatcctgtccaccataaataggcagtactttcgcacgcttatcttgtccgattttatataactcttcagatacttgaatggctaattcacgggttggcgcgattacgattgcttgaatattaggagactcggggttcattttttcaacaaggggtataccaaacgcagctgttttacctgtacctgtttgcgcttgtccaatgacgtctttatttgaaagtccgagcggaatcgtttgtgcctgaatcggcgttgcttcttcaaatcccatacgattaattgccttcatgagatcagaacttaattgaaaatcttgaaacgttatagtcaaattattcaaactccttctaattgctgtttcagtaatgtcgtgatttaccactaaaaactgtcctttcattcaaaagacaggatcgtacgtatacaaagcccgaattactttacgtttaatcttaccattacagtatgtgtttttcaataaggcgagatggtcaggcggccggaagcggcctgaccggattcttcccgcgaatgatgccggcccccgcaccgtgcgggttttcccagccggcgggatttctttttcatacggacagaattatttcaccctgaattagtttcttcatttttgataattttataatgctgatcggtattttttcagttcttctctaataaatctttaacgatttcttcgagcttcatacctcttgatgctttaaacagcaggagatcgccggaagcggcacttttctgtatcgcgtgaagcagttcttttttgtcaagataatggctgacgcgcccttcttcaaaatgccggcgcgctccgtcagcgatgaatgcgccgagtgtgccgtaagtaaatacatgatcgatttccgccggattgatcgcggccccgcattcttcgtggaatgctttttcattatccccgagttcaagcatatcaccgagcacgagcattttcttccgatagcctttcatcgtttcgattaattcgaccgccgctttcattgacgtcgggctcgcattatacgcgtcgtttacgattgagatgccgttttccgttttgaccagttccaatctcatacccgtcaccttcaggcggctcagtcccagagcggcattttccggcgtaatgccgaaatagatgccggcggcgtatgcggccatggcattcatcacattatgtctgccgagaacgggaataaagaaagaacggtcgattccgtcgatattgaagtacgtgccttcttccgcctgttttattcctttcaggcggagatcattgtccgcgcctgcgccgtatgtcgttgtccggcaagtgtacgtcttttcgcgaagcagcggctcatccccgaaataaaacagaacgccgtcttcccgaagtccgtttataatttcaagtttcgcctccgcaattccttctcttgagcctaaatcctgcatgtgggattcgccgatattggtaatgacggcagcttccggttcagcaagacggctcagaaaatcaatttcgcctctcgcgctcattcccatttctaaaacggcgatttctgtatcttcaggcatggcaagcacagtcagcggcaggccgatatgattgttgaaattgccggcggttttgtgaacgcggtactgcgtgccgagaacggcgtgaagcatgtctttcgttgtcgtttttccgttgctcccggtcaccccgataacccgtgtgccgagctcttccaaataagcttttgccaatgtctgcagcgcctccagcgtgtcatcgaccaagatgacagcacgctcctccggcggattcgattcggagcgttcccacaacaccgcggaaacgcctttttcgaatgcttgcggcacaaaggtgtggccgttaaaatgctcgccttttaaaggaatgaacagctgatttttttccaaagtccgcgtatccgttgcggcgccctcaatcattgtttgttcaaatacgggatttgtcagtgtgcctttgaccatgtctgcgattcgttttacagttcgctttatcaaaggtggcacctcgctttctgaaaatgttgtctgttacgggaaaagacactgccccttcaggcagtgtccgtcttcattaaaatgtatgtttaatcagctgtttttcggcatggcgttcttttgccagctcaaccagctgttcgatcagatcactgtactctacgcctgcttctttccaaagcagcgggaacatgctgaatggcgtaaagcccggcattgtgttcacttcgttaatgagcacttgaccgtcattggtcaggaagaaatcggcgcggacaaggcctgatccgtcaatcgctttgaaggctttaatcgccatctcgctgatttccgcatattgttcatccgtcacttgcgcgggaatcattaaatccgtgtcgccgtcttcatatttcgctttgtaatcgtaaaagtcggttttcggcgcgatttcaccgacggcggagcatttcggttcgtcatttccgagtacgccgatttcaatttctcttccggcgattccttcttccaccacaattttccggtcatactcaaaagccagttcgaaggctttttcaagctcttcacggtttcggcatttgctgattccgacgcttgatccgaggttcgccggtttgacgaagcacggatatcccagttcttcttcaacctgctgtaagcagctgtccggcgtctgtttccagtccttttttaagaaagcggcgtacttcgcctgcggaagccccgcttgagcgaacaaatgcttcatgatgactttatccatgccggctgatgatgcaagcacgccgttgccgacataaggaacgttcagcaattccagcagaccctgaatggtgccgtcttcaccgttcggtccgtgcagaagcggaaatacgacatcgatcggcgccttttcgtcagtcgacgcttcaggaaacatttcccggttcaatgctgatagagcgaaattttcaccgttttgttccagctgaagcattttcacgttggaaaccggctcagtcagcagcgggcctctttgccattctcctttttcagtgatgtaaatcggatgtatatcaaacttctcagtattaagcgcttttgttacagctaatgctgtctgcagcgatacattgtgttcggctgactttccgccgtacaccaatcctagacttgttttcaatggatattccccccacaacaattcatctttactatcttatcactttcctcagaaaatgatctaattatttttgggcattctgaatatgaaagcatttgtatgtaattcctttttattttatattaaaatggcatggaaaaggagatgtgtcatatgaaaaaaatcagtacaacagaacaatttaatgaacttattcaatccgacaaggaaatcatcgtgaaatttttcgctgactggtgccctgactgcacgcgcatgaatatgttcatcggcgatattttggaagaatataatcaaaatgattggtatgaactgaacagagacgagctccctgagcttgccgacaaatatcaggttatgggcattccgagccttctgatctttaaaaacggggaaaagaaagcgcatcttcacagcgcaaacgcgaaaacgcccgaagaagtcacagagtttttatcacagcatatttaattcgtttcacgatctttgtttatgacttcaggctctacatgaacatggacatgagtcacatcatgttcatgttttattgcatattcgacctcatcggctacttcatggccttctttcacagacagtcccggatctaccgtaatgaccagttccacatgaaccgtgctccccaaataccttgctttcacatccttcagcctgctgacctcttttatttctttcaccgtgtgtttatacggctccaaatctttcagatcaaacccgtccgtcaatgagtgggaagcatctttgaagatgtcccatgccgtcttacagatgatgattccgatcagaaaagcaatgaccggatcaacccacggcagatgaagccgggcggttaagacgcctataaacgccccaatactgacataggcgtcagaacggctgtctttcgccgccgcatgaagcgcagaacttttaacccgatccgcaagacggctgttatatacatacatgccgtacattacaatcgcgcttccgagcgccgtccatgccgcaatgaagctcggctcggcctccgttccgctgacaatcgcctttgctcctccgatcagcacttcaataccgaccgccatcataataaaagacgcaattaatgaagaaattgtttcagcccgataatgtccgtaggcatgatcactgtccgcggggcgctgggaaatccggagcccgatcagcacagccagtgatgcgacaatatccgtggcattatttaacccgtccgctctgagcgcttcggaatgataaataagaccgatcaccagtttgacggcggcaaggatgaggtacgcggcgatattaagaatcgcgcctttttcgccccgttttaagtttgccgtttgatcattcatgtaaggactcctccattctcattcatagtatggatggaaaagcggaaaaatagcagctttgatctgagcaagtgcaatattcgacagcattattccccgggaaactttttgtcgaaaaattggcggtattttccctttacatatgaatatgcccattgtatactttcattaactgataatgattctcaatatcatttgattaggagggtaatcatgaggtcttctcctcagctcagatcatcagttgaaggacgaaaaaaacatctgatccatttgctgatcaataacggaatatacaaaaagtcggaacggcatttatatgaattatcgctcggagaattagaaagcgaatacaaatatgtaaggaaggtgcgggctcatggcgaaacgtaaaataaaaacatacgaacagctgataaaagaaaacaaggcggccattatgaataatcaaaagctgatgaatgtgatctatgacagaattgaccgcaagcatcaaaaactgctccggcacaacagccatacataaaaagagcctttttcaggctcttttttttattgctcaaaggcttccgccgctaatttgccgatgaccgcatcgtccatcggcggattgtgaaggccggcccgggcatcccgataataccgctgaagcggattgtttcgctccaggctttttgcgccggtgattctcattgctttatcaacaacagaaaggaccgcatttgtcacaatatgttttgcggcgccaagctcgcttttgatgaaaggacggcgtttcgggtcatcatacatttgcgccgccgtgaagagaaactgtctcgcttttaacaattcaagctccatttccccgacacgctgcccaacggccggcacgtctttaatcggtccgttcaggctgttcggcgaatattcggatgcaaaccggacggcatagtcccttgccgcttgagcgatgcccagataagcagcgggaatgtgaagcagccagccattcactttcgccgctctcggcccgctgataagctccacaagccgctcgtcactgaccgtgacatgatctaaaaggagatcatggcttccggtcgccttcatggcaatcatatcccatgtttcttcgactgaaacgcctgactgatctttatgaatgagaaaaacaccggtcgtttgtttttcttcaatccatgccgtcacaagcatataatccaaagtcagtgaaagggttgtaaaggtttttcggccgttcagcacccattttccgtcttttttgacagcggaggtgccgggtcttcctcccctcgtcggactgccggtctgccgttccgtcgctgccctgttcaggacagctccctttttcacctcttctgtgataaatgaaaagacatcttcatcccagctgtttccttctccgagctcacccatgacggataaatgccagccgattccgagagcaacggccgcgtctccccgcgccatccgttcctgaaacagcaccatatcataaacggaaatgcctgcaccgccgaatacctcaggtaccgttaacgccgtatatcccgcgtcgcgcagtctttgaattttctccgcgggaaaacggcccgcctcatcatcaagcgcggctgttttttgaaattcgtctgcaagcaggccgattttttccatccattccctctgccgttcattctgtatccataaagacactggaatccccccattataattccgataaagttaataagtattatagagattcaagtctcgtttcgcaactgtgaggctgtacaaaaaaacacgctattccatggaatagcgcgttcagactgcttccgggccgcggtcctgcttaagcccgagataaatcagcatatatgtgagataacccatcgtcatcacaagcccgccaaagaaaaagcttgaaaaaatcggctcttcaaacgcggtaactgccgcaagcacgatccagcttgcatacaggtagatgatgaaataacggaatcccgacttcattttatataagagaaacagccccactgtagaaaacaaacccagcgcaagcctgaaataaacaagatgttcgaattggaacatgaatgacacaaaggaaaaaccaagcaataacacaatcggtaatgcggtaataaaatttctcaagtgagcacctccgtcattacctttattataaatcaaaatagcataaattattgatttatcgtgatctttttcacaaaaatgtcattcctttactttatacccgaacatcgcgtttgcaaaagctccaccaagcgacggctaagaagaatacgatatggataatgataatgcctgcggaaaataacggcgtcattcccgcaaacagcggtttcgccccgctcatatattgcgtcaggtcagtatttgcgaacagcagaaaacttccccatttgttttggaagagcgacataatcgtcacgagtgattttgcgccgtacagcacgataaatgacaaaatgacggccgttgcgctgtttcggaatacagaagaacacaacaagccaaagcatgccatcgcaaacgcctcgacccagttcgtgccgattactttcagggtgttcataagaagcgtccctgattcagatgtcaccgacacgccgaagaaagccatgccgaacagcagagacagaatatagtacgccgcatacaggtacaagctgaccaaaaatacggtaatgagtttagatacaaaaatccgctcccgctttaccgggcggattaacaaaaatttgatcgttttcttatcaaattcagcggaaatgatcgttgccgcgatcacgattgttaacgcctcaagcagaatattcagcccgggcgcgtacgccatatagccgatgaaattctcatccgttccggaactgatgacaagccgtttaatgacaagcgccataataaattggagaacggccatcagaatcagtgccactaatgagacttttcggttaaagagtttcatatgctcattcgctgtcaatttaaacattcgtctccccctcctcttgaagcgccgtcgtcactttcatgaattcatcctccagcgattccgcatacggcatgatggaatacacgagaaagtcttgtccgacgagcgcacggtttaatgccgggatgtccttcttcgctacggtgacggtaatgcccccgccgtttttctccggagcaaattgctgctgggacagccattcgaatgcttcgtcagccggctgaatgtcgaggacggctttttcttctttttcctcagcgccgcgcagaacaacctctgttttgatctcacctttttgaatgatgatgacacggtcgcaaagatcctccacttcacgcaataaatgcgtcgcaaaaaggatgctcgtcccttcaagctccgcgagttcctttaagtgatcgcggaaatccttcattccgccgggatcaagcccgtttgtcggttcatctaaaatgagcagattcggacggtgaagaatggcctgcgcaatcccgagacgctgacgcatgccaagggaatacgttttaactttgtcatgaacggcattggtgagcccgacccgctcgatgacttcctgaagcctgtcctctttgatgtttttgtgcatgttggcaaagtgcttcagattttcccaccccgtcaggtacgggtagaattcaggattttccacgatcgctccgacggattcaagcgctttttcgaaatcagcatcgtgctgaaagccgttaattgtaatcgtgccgctgtttttctttaaaagaccgacgatgattcggataagtgtggtttttcccgacccgttcggaccgagcaaaccgatgatctcgccctgcctgacatccatgctgatgttttttaaaatgtgctttttgcctattgttttgtcaaggccttcaatatgtaaaatcggctcagtcatacagccttcctcctttttcacaaaaaataaacagtgcccgtacataggcactgtctgcattataacattagtcatatattcgtgaagagccggagccgacgttatgtcttatccgggaccggtccatttttttccttctcttcattattgacgacatccagaatatcgagcaggaacacaaaaatcggaattccgataatcaagccccaaatgccgaagaaatgttccgagaaaatcagaactgtaaaggtaaaaaagatcggcagttccgttttcgctgacatcagtttcggattaaggaagtacgtctcaatcgcatggatgacgaaaatgaccagcacgatgtagatgacatacgctgcgccgcccgtcgtatacgcgatgatgctgagcggaatgagcgaaatcaccacacccgcaacgggaatgagcccgaggaaaaagaccatgatggacaggccgaacagctgcggaaaatgcagaatcgccaatgcgatcaaggtgaggatacagttcaccagcgcgataataaattgggcttcaagcactttgccgaatgttctcgcaaacttgctgccgaaataagcaagttcgtagtaaaaaacagacagcttgctgtgctgaaattttttcataaactccgtgagccgctttttctcgaacaggaaaaacatgctgagaatcagtgacatcacgacctgcaaaccgaaagtgctgatatcggccaagtatgtatacagtacattaaagccttcttttacataggaaccgatattgatatcgccgaacacgctcgatatctcatcataaaacggaatgacatcgggatgatacgcgatgtgcttgatctgcttaatcagctgttcaatctgcttggcaacaatcgggtaaaagacaaagccaccgacagtcgccccgacagccagcgcaatatataaaacggtgatgaccaccctctggctgatccggaaaaaatggttcaacacgtgccggatgacagtctccagccgatccatcagaaaagtaaaaataaacgtaagcaaaatcaaattaatcatacttcggaatacaactaacaccccagtcaaaacaagaaaaacggaaaaacgtctgacacccggatgctgaaaaaatttaaaaatagccgccatttatacactcctgctaggacaaaaagcccttagatttcatctttcactctctaattgtaaattatataacaaaatgacgctaaggtctttgtccacctcctaataaatttaaacaaatttatcttttttactcatggcggccgaaaaaaagaacggcatgcccgatgcatgccgttcctttccttttataccgccgttttcatttctttaacggcctgtgtgcttttcacttcgtcaaactcattttcgctcttggctacgatgatggtggcgattccgtttccgatcaggttgacgatcgcccttccttcactcataaagcggtcgacgccgaggagcagcgccagcccctccagcggaataacctgaagcgccgataaagtggaggcgagcacgataaatccgcttccggttacgcccgccgcgccttttgatgtcagcatcagcacgagaatgatcgtaacctgctggccgatggtaaggtcaacgccgaacacctgcgccagaaaaaccgtcgccatggacagataaatcgaggtgccgtccaggttaaaagaatatcccgtcggaatgacaaggccgacaaccgatttggaacagccgtagcgctccattttatccatcatccgcggaaggacggactcagaagagcttgtgccgagaacgatgagcagttcatctttaataaaacggagatagttccacaagctgaaaccgaatagtttgcaaatgatattcaaagcgacaaatacaaacaggaacatcgtaacgtatacagacagcatcagactcgccagcggcttgatggaatcaaggccgaagtgtccgatcgtataggccatggccccgaatgcgccgatcggcgccgcgcgcatgatgtagccgatgattttgaaaaaaacatgcgacagtttatcaaagaaatcaataatgcttttgcctctttcaccgagcgccgccaggccgacaccgaataaaacagaaaagaataagacctgaagaatgtcgccttttgcgaaagcgtcaaccatatttgacggaacgatgtgagtgataaattcaatccagtcaatcccctgtcccccgttttgcgtgtactgagagacatcccctttttcaagcttgctgtaatcaagcccctcaccgggtttcatgatattgacgaccagaagtccgataataagggcgatggtggtcacgacttcaaaataaataaatgcttttcccccgactttgccgacttttttcatgtctcccatcttggcgatgccaagcacgatcgtcaggaatatgatcggtgcgataatcatttttaccgcattgataaatgtatcgccgagcggcttcatctgcttcccggcctcaggccatacgagtccgacaatgacgccgatgataaccgccgtgatgacctgcaccgtaagatttttgaaaattttcatccctactcccccttgcctctcgctgcgtctatacaaaaatgatagcgttttcaaacgaagaggggaagcttatgatcataacggacattttggtctttttggtctcggctagcggacgaatttgtagcggttaaccggccggcccactcccccgtattgaatgtcgagcttaatctggccgtctttttcaagaaaatcaagataacgccgcgctgtcaccctggcgattccgagcgctttggcggcttcttcagctgaaagcggctccgtctgctgtttcatataggtcaaaatttcattcatcgtaaaatgatttaaccccttcggcagatcgcgggacggattttgcggaattttaagcagcatgtcaagctgctcttgcgacatggtgtcatgctcttcaattttccgtttatattgtttatagttttcgagcgcctgtctcatccgctccagcttaaacggcttcaaaatatagtcggccgcaccgttttgcagcataagctggattgtttctttgtcttttgcagccgagacgatgatgacgtctacttcgagcttttgttttctgatttcctggagcgttttaattccgtcttttttcggcatgtatacgtctaataccacgagcccgggccgcagatcttttataagcctgattccctcgtctccgtcagcggctgtggcgatgacgctgaaccctgaaacaccggtgataaattctttattcacctcctgcaccatcggatcatcttcaataagcagcaccttgatgtccatcgaatgattcctcccccttcatcggaaataaaatagaaaatgccgttccctgtccctgccgtgtgtcgacttcaataacgcccatccctttgtcgacgatttgtttgacgaggtacaagccgtatcccgttcctcccgttttattgacggtaaaccctttgtcataaaggtgcgggatgtgctgatcggaaatcccgcttccgttgtcttctattaatatagcaagcacttcatcattttgctcgatactgatgtcaatatgtttgtcctccgtgtccgctgtttcgaatgcgccgaacgcattttcaattaaattgccgagcaggacgacgatgtcatgctggtcgacatgctccggaaatgccgagaaactgctgttttcatcaattttcacagaaatgccaagctcttttcctcttttgattttgcttaacagcagccccgccgcagcgtcattctgaatggcctgatgaagaaaatcggtgacactttcttgttctgatgattccttaaaagcaagctggagcgctttttctgattttccgagctgaatcagtcccgcgatggtgtgaagcttgttcatatgttcatgattttgaactctgagcgcatcgacaaaatttttcacacctgtcagttcttccgccattttcgccgcttccgtcctgtcctgaaaaatggcgacggctccgatgaccttctttttcatgacgatcggaattctgctgctcataatcacctttccgctgacttggatttcttcattatataccgctcggttccgctcgacgatttcagggaggcgggaatcttttaacacgtcccagatcagcctgccgtctgtttcttgtctgacattgaatatctgcttcgctttttcattaaaaatggtgatgtgatgctgattatcaatcgcgatgacgccctcattcattgaatgaaacgtagcggtccgttcctcatacattctcacgatctcatggggctccagccaaaacatttgttttttgatgtggcgggccagcaaaaaggagccggccagtccgaacccgagcgccagcagaacgataaacagtatttcatgtttcagctgaagaagaatttcaccgaatccgggcagcgttttaccggccagaacgacgccgatctgattcaaatcccggtctttgatgggataaaaagcgcggacggcggtgccgatttctccctttgcttcggaaaaataaatgtgctcggcgaacgccgcggcttcgtcctcaccccttgaacgctttccgatcattgtgctgacgggatgtgaatagcggatatgatccatatccatgacgacgatgtagtccgcttcattgatgatccttatttcttcgaccgcatggcgcacgtcttccctttgttttttctgctcgagggcgcgtttgacatcggtcatctcagataccgtccgcgcggtattcatcagccgttttttcagctcgcgctcctctgtatgctgaatattgccgatcagcacgatgccgacgatcaaaaaggtaaaaagcacgacgatatacgaaagtatggtgattttccagcggatggtgagcttttttttcgtcattggcctcttcctttccgtctctttacgaaaacggcccgcccgattatgcttgttatagaaaatggcggagggggttttcgatgaaaagcttgctgacttgtctcagcctgatggtactcggtatcggaaccgctttattcatcggctttcatgatcgtttctcaacggaagaaccgtattatgatgacgaacaggaaggcctgaaagatcaaatcgttttcaaattcagccatgtcgttgctgaaaacacgccaaaagggcgggcggcgaataagtttgccgacctggtctatcaaaagtccggcggcaccattaaagtagaggtgtttccaaacgggagcctctattcagataatgaagaaataaacgccctccaaaacggggacgtgcaattcatcgctccctccacctcaaagctcggatcactgtctcccgaatggggtgttttggatctgccttacgcgtttacaaactataaagccgtgcaagaaggcctgaacggcaaaatcggcacacgcctgttcgcttctttagaaaagcatcatttgaaaggtctggcgtactggacgaacgggtttaagcagcttacgtcaaataaagggccgatcttcactccggacgatttgaaaggacaggcgctcaggatcatgccgagcagcgtgatcgaagaccagtaccgtctgctcggcgcgcgcccgcggcaggattcctttaattccacgtttcagctattggaaagcaatctcgtagacggagaagaaaatacgatttcaaatatctattctaaaaaattttataatgttcaacattatttgacaatcagcaatcacgggtacctcggttatgccgtgatgaccgacgagcatttctggaattcgcagacagaaaaaacgagaaccatcttaacggaggcgatgagagaaacgacggagtggaacgaagcctccgctgagaaaatgaataaagaccagcttgaagagataaagaagaattcatccattcatattcatgtgctgagcaaagcggaaaagaacacatggatgaaacgcctcgacccgatttacggacaatatgaacaggtgatcggccgcgggcttgtgcaggatttgttatccttgcgccgcgagccttagcaggaccaatacgcccatctccgtttcatcccttttcccgccggggaagtaaatagggacagagcaaaaaaaggagatggagacatgtttacacatacgaaaaaactgcagcatccggctaaaccggatcgtcctgacccgctgttcgcaaaaaagatgcaggaaattttagggggacaatacggggaaatatccgtcgccatgcaatatttgttccaaggatggaatacacggggcaatgaaaaatataaggatcttctgatggataccgcgacggaagaaatcggccatgtcgaaatgatcgcgacgatgattgcgagactgttagaagacgccccgctggcagagcaggaaaaagcggctgatgatccggtcatcgggtccattttaggcgggatgaatccgcatcatgcaattgtctcaggactcggcgcaatgccggagagcagcacgggcgttccgtggagcgcaggctatatcgtcgcaagcggaaaccttctggcagacttccgcgccaatctgaacgccgaatcacaaggaaggcttcaagtcgcacgcctgtatgaaatgaccgatgataaaggcgtgaaagatatgctcagctttttattggcccgcgataccatgcatcaaaaccaatggcttgcggccattaaagaattagaagaacaggaaggcccgatcgttccttccacattcccgaaggcactggaaaaacagtcattctcccataagcttattcatttctcagatggcggagaaagcgctgaacaaaattggctgaaggaaacagcgccggacggagaaccatttgaatacgaaaaggaaccgaaagcgcacggcgaaatagctaagctggatcctgtcccgccgtatgtccacaacacgcttcccggacgcgagtaaagacacaagcccaaaacaaactgttttgggctttcattatgccttctgaaccgtccagtccggttcgtatcggatgtccgggtgatgtaacagctcgtgaatgacaggttcatcctcttcatacagcatcacttctattgaaagaatcgctgccttctgctcgttttcttcgtatatgcggtcatgttcgttctccataaaatcatcataggcctgtctgttctcccaaacgctgatgatctctgcgatgaacaggccgtctgcgtttttccgccacccgccggcctgtttgacgaagccatttacacatgataatgctccccaccttgactgtgcttgcgcaaatgcttcagcgtttgcagcgtctgtttcacatacaatttttttgatcagcatgacgttcctctgtgatgactgttttcgcacgcgtatgctcaacacacagattcacggttctgacgtaagagcgggtgcggtgaatcgtgcctttcgggatgagcaggctgtcatttgctttgagcactgcggtttctttgtccttaaaatcgatcagcagctccccttccagaacgatgaaccattcatctgagtcagggtgatggtgccagtcatattctcccgtaaacactgcgaggcgcacacagtggtcattgatctccgcgattgaaaaattgtcgtgtttttctttgactttattggcgatagcgagcaaattcagcatgtcagacacgagtgaaaaacccctttttcatttattgtatcgcaacggcggctcagatcaagattttcccaaaataaaaagcgatccagctgatgcgccggatcgcttttgatctgcaggttgtctgccttttatgcttttattagctgcttcgtctgtttccgcctttttggccgatttccttataaaaatctttgtcatgatttttgctagtggcttctccgcctttttggccgatttcttgatagaattccttgtcatggttattgctagtggcttctccgcctttttcaccgatttcctgatagaattctttgtcgtgatttttgcttgtggcttctccgcctttttcaccgatttcctgatagaattctttgtcgtgatttttgcttgtggcttctccgcctttttgaccaatttcctgatagaattctttgtcatggttattacttgtcgcttctccgccttttttacctgcttcttctctgctcattttgttattatcttgtgccatttttgaattcctcctttaattggtgttggttgttggtttcccgatttcagaactgctaaacaaagaaaacacattgaatgtgttcgggtggttttttatcattctgtatccttcatgcgttttagaatccggcgttttttataaagcatgatgcctgtttccgcgatgctttctaaagctgaacggttggcggacgcgccgaagatgatgcctgcggccggaaccatttgcagcagttttttcgcggcgaacgtatcgcgatagctgtaaacgacttcccgccagccttggatttgcgaggcgacgcgctgataggcgcggtcgttttgatcatattgccgtaaatcttgcaggatcgctttttttccgatgacgtcactggatgcaagctgtagcaatttgacgataaacacgcgttcttttttgtctttcggatcaaagccgtaagcaaccgcgatatcctgcagcgtctttaaggacaggccgagcatcgccggaatgtctgccgccagcgtgaatacgccgccgactcccgttgcggctccctgcaccttcgcggcctttacgcttgtacgcgctatggcttctgcgatttcgtccatgacggcaagcggcgcattgcggatgtcgtgaagcgtttgacatgtaccgtgcggcagccgtttttgaaactttttcatgatgcgcttttctgatgtcaggtactgtccgcctgactgaataaacgttcccgtttcatcgagaatgagtccgattttcctctgaataaattgcggtgtcagcttgtccaaaagctgaaacggcaagcgggtgaatgtttgccagaacatcaccctctgctgcgccttttcccatttttgaatgtctctcagttgtctttccaggtctgtccgctcttctgtcacccgtcctgcacgtcctttctgatttctttcttcatagtatacctttatggcgttttctttttacatccggacggattttttatccggaaaacatcccattgtttaatttccttcaaattctgtatattgtataattttgaataatacgattgaaggagaatgttgaatgcaatggatttatttaagtttagcgatcatttttgaagtattgggtacggtcagcatgaaattatcaaatggatttacaaaacttgtcccaagtattttattattattgttttatatcggcagcctttgttttcttactttgactttgaaatatataagtgtctccatcgcgtatgcggtctggtcgggaatggggatcgtgctgatttccgtgatcggaatttttttctttcatgaacagttctctgtcataaaagccgtctctgttcttctgatcatcatcggtgtcgtttccttaaactttatttctgaaagtgaaacgtcatcaaacggcatcagcgttcatacggacagaaacagatgatgaaagggttaaaggttctcttcctcattacagatattggatttatcgtttattggattgttactttttttgagtggattccaaaaaacatggtgtttaaagattatgataacgccatgatcatggcctggaactggtcattctttcccttagatattttcatttcgataaccgggctgtacagcttgtttctttataaacggaaacatgcgttatggcgctctttcgcattaatatcacttgtgctgaccttttgttcaggcctgcaagcgattgccttttgggtatttatcggtgattttgatcttatgtggtgggcattcaatctgtacttgcttctttatcctttatattttattcggaaattgctggtctctcgtaaaaatagctgtcattctttttgatgaggcggttttctttttcttcaggcgggaaacacttttcataaaggagtgatagacatgccttggtctatgaaggattatccgcaatcattgaagaatctcgaggaacctgtgaagaaaaaagcgatcgaaatcgcgaatgcgatggtagatgagggttatgaagaaggacgggctattcccattgcgacaagtcaggcgaaagagtggaaaaaaaacgcttctaaggaagaaatcgatcagctgatggaacacgatgatgaaacgaaacgcggaaattgaatcggaataaaggaaaaaccccgctctcaagagaacgaggtttttctgattataaaccgtaataataggataaagtggtgactgaaacgtagcctgtcgctcctgcatacgtgaccttcagccatttattggaattggtgtagtggccttgaacatattctccggttacccaagaacctgtaatttttttaccgcttgagaatgttgtgatcgttgaacagctgaccttagagcatgagcgcatattagcaccgtaaataccgactgtgcccccgctggctaaaatggaaacgtccggttcagctttaggtttgaaagctgctgctgatgcagagccgccaaaagcgaataaagaaacagcaaaaatcatggctaaagaaatgatcgacaaacgacgtaccaagaaaattccccctcttttatcatatggccggaaagctttcctgacgttattatactttttcgcccgggagactgaaataagtctaatgctccaacttcttttcttcgcaagtgaccatgccgattctttttttgatagataacagcggtttattagactggaatcactgaaatatcgttgattcaaacgtttattcagagcggccggagtttttccggaggtcatttgaatggtacagagaggttttatcttccaatggaaagaaacattattattctatttacccgggaaaacggaggaaatacagcgtctttttctcaaatcagttgggcggacagaaagttgtgaagttatataggcaagtgtcctcttttcacctttttaaaagaacgctccacgcatccgcgcatgatccgacgcggaaacacgctttgcgaacggcatcgcttctttcccggaacgatgccgttttcattttcggacctttcttcggcgggatacatatcatagataaaacagggcatcaatgtgccggtttattgaacataaagaacttgacatcttataatagcggatttatgatgtagataaaataatttgcgtctaggaaactttttgttatttagctaaaaatctatcggaatttaggtgagacataatgagcaaagacatctcagcacaatcactgcaagcaaaagccgtgcaggatgcacttgacggcaaaagcaagggattcaagcggcttctgccttttttaggccccgcctttatcgcggcgattgcctacattgatccgggaaacttcgctacgaatatctcagctggttcgaagtatgggtatatgctgctgtgggtcatcctcttttcaaacttgatggcttttttaattcaagttctttccgcgaagctcggcattgccacgggtaaaaaccttccggaaatcgccagagaccggtatccgaaatgggtatcagccgggctgtggatacagggtgaactggtgattatggcaactgatctggcagaatttatcggggcggcgctcggactcaacctgctgttcggcataccgatggttgaagcggccattatcgcggcgatcggatcattcgcgattttagagctgcagcgccggggttatcgggcgctggaagcgggcatcgccggacttctgttcgtcgtggtgatcgccttcgctctgcaaaccttctttgccaaacctgacgccgcctccgttctcgaggggctgtttatcccgaaaattgacggaatggacagtgtgctcttggcaaccgggatactcggcgcaaccgtgatgccgcatgccatttacttacattccgcactgacacagcgccgtgtcgtcggaaaaacggatagtgagcggaaaaagatttttagattcgagacgattgacattctcatcgcgatggtgatcgccggggcgattaacgcaagcatgctcatcgtcgctgccgcgcttttcttcaagaacgggctgtatgtagaagatttagacgtggcttatcagcaattcggccactatatcggaccggcttcagccattctcttcgggatcgggctgctggccgcagggctttcaagctcttctgtcggcacattgtcaggcgatattatcatgcagggcttcatccgttaccgtatcccgctttatttgcggcgtttcattaccatcattccgccgatgatcatcattatctcgggggtcaacgccacagaagcgctcgtatggagccaggtcgttctttcattcggcatctcctttgcgctcgtgccgctgattatgtttacaagcaacaaacgcctgatgggcgccctgacgaaccgaaaatgggtgacggctctcgcctggctgattgcggttttggtgatcgcgcttaatctgtttgtgatctacgattcattccgttagaaaaaaaccggccattgcggccggtttttcttttgacgccgggtgccgttcgtatctttttccgggcgtttttggtatgatagaagaaaaatcggagttttgcttatgtcagtatttatccttttttatctgtggattgtgccgattgtcatcggcatcttctgttctctttttgcttatcggacaacgggtaagaaacgtctgattcccggctttttgatgatcgcattaagcatcgtttccttaatcacggggctttggatcggcggggtgaactatcatgtgttcatcgggggcatgtttttattcggtacgttattggccggctccgccttcccgtttttcttcgctctttcacgcaaacgaaaataaacaggcatgccgcctgtttatttttattcattaaccctaaattataaaccgctccgataatgtgattccgcctcaatcagcctgtacatgtgttatataggctccagcccatgtcccatctcatcgaaactgcagccaaaatgaatcctactaaagaagattttgaattataagaaaaatactgtattaaaatcctatttaccccaaaaatacctattgatagaatggtatctgagaggggaaaatgttcaaagcggatcatatcggtcccgcctaaatacatagtctttcatttctctctacactacatttctaaaggaggatttcccattagacacgcagctaaaggcattctgtttgccgcatctttagcccttgtaactactgcttttgtccccgcatccttagctaaagaaaatcataataatactgccaatgccactggaacgaccaaatcatttttttatcagactgatacgcaattttcctacggacttaaagcacaaagcgatgcatctgtgtcaaaaccagtcaaagatgtaatcagagaagtgctgaaaaataaaacaaaattattcaatcttgttgaaaaattagcaggaaagaaaataagaaatgaactcgaatccgttttcaatgaacacatcgaaccggttttaaagaaaatgctgaacgagtatgtcgccttaagctgggctgacgtggaaaagaatctttatctttcacttaaaaagtccggactttctgacagccaggctaaaaacctcgctcaattgacaactttagcaatgaaagcattttaaaatcattcataaatgatcgtcaggaaaatacgtatgaagtaatgcaaagtgctgttagattcactctaatagcactttttcattggagatgtcacatgactgtcttttttactgttctgctcactttcttatgctgccttgtgatttcatctcttatttttatgattctattaaaaaaagagatcgtggatacaccgcccaaccgcttagctcatgcagcattcatcgtacttattggattctccctgttcttggctataactgtacccagcctagttatgtattttgcagctataactgtaaatcattttttcggagaatatatcatctatggttcactttcagacttatacatattttctgtcgtcgtaagtatcttagctttagtttatatgcttatccttacggcaattgtaaaaggaatgactcatgttttgacattgcctgcttggtcagcctatatccttgaattcatttttgcatgggctgctgtttacttctcaatccaatacgtttccaatcatatcattgagaacatatctatatttcaaggtggagaaattcttctttcattgttcatcactttcttattttcgggattggatatccttttcactaatttggataagatcacaaaagagaaattaggctaagggggtaacaaatatgagaatcatgacatatatatcctatttttctatttctttagttttgcaggtggtatggctgctattaataaaaagaacctctaatatatttctgatagatatgattacggtgtccttcttattcaccctctttatgttcatcttagatcaaatgttcaaaaataagcggacaaattagggactgttttttaataatcctcgggcttctctttcgttttgaaatgattccggatctagagatgttacggtgagccattcattaatgaataacaccagcctctttaaaatacttcttcttttatataacatcctgacttttccgtcatatattcatacgaaaaaactgcaatagggagtaatgaaacatgatattgtttattggcaagttcatgttgctctttttactctgttcgctggcgcattatttgtttaaaattgtttattacaatatagggaagaacattgcgcttaaaaccccgaaagggacaaagacaaaccggacggcacttgtgtttgtcaaaaatggaactacactgaatgagggagattactttatgatcgctgttgtgaccgctctctggctgttcttgagatgaattgcactggtccttcataagttttttgatcagccatcgctcgccagctgccgattttcacaatcatcgttttcgtttaggacggctatatgcaagcaagccgctcaacaaacaaaggagctgtcgagatcttctcgatagctcttttgtttgtccttgaatgattgaagataggcttaaaaatggacggcgtctttctcatgcatgcatcgttcaagaaaacacttcacagcaaaacggaaaggtgaacgcaatacaagtaacggttaagaaccttatgaggcagcgtatgttgattactggataagaaaaagaaatcccccagtcttaaaaggtggaggtcaaaaattggagaacacttaaatatttatagctttttcagcgatataaaaagttccagagtcactcatttcagcagtataaacatttgtcacacttaataatccagtaaaaagaataccgattaaagcggagctgattataagtttcttcattatatagcctccgtaaccttaagtatttgtgtttgggcatgtatggttttctttaaaaagtttcttccctctacatagtttctcttctcaaaatgaaagtcacctaatttttcggttagctctgcgaaatcagaccaaaggcgtttcttttccaagtaacctaagctttgtttcacttctgtttcattatattcttcttataatgaattaatgatttttaatttagccaaatattcttcttcattagaagtccgagcacgatttagagccgtttcataaaagaaacgtgcttccttggctttatcacattggtacaggacattcgccatcatatataatgatctcactccatacactgtatcaatatgttctttcacgtctattgcctttttgaaattctcttcagcagcaatcaaatttttccctcttaaataaactaagcctaagttatgaaagatcactccgataattcttttcactttttcctcatccaagccacgggcgatacttaatgcttcccgataatatgattctgcctccgtcagcctgtacatatcgtacatgttagcaccgaccatcatattacagccaatcactttcactttgtatagttgacttttttcaaacaattgcttggctttttttaaatgattgagggaaacaaagtgctgatcaatttgataataggcatcagctattttgtaatgaaattcagcttgctccatttcatctgatacagcattcaactctctctctgctttgcgataatagcttatcgcttcaacatactctttatgatcaaattcatacattccacgaaaaaacaatgagtaatatttcaagaggcctgtaagtcttttttgtggtttttctattttttcaagcagttcgtcgactgtagggcgatctctatatctgtcttccggctccaaggaatctaacatcaattggtgacgaaagcacatcaatgaataaaagacaagcaaatcctgatcctcttccatctcctctatttcctgttctacttcagcctttaaaatctcagcatcaggcacactgaactggcgaatcattttgtaccattcattgatcttgacaccaacttgggacgacggtaaaacttggtccacacttatccctccctctaatcactatttttgtaatattataacttttcctacaataaacacaaacgaaaaaatcccgcaattttcgtcgcgggatttttgggattatggttttgatgtacactcttgattattccatttaatattttcgctttgtaaaattcattatagtcttagtgattgaaccggagataaggcaggctcccgtcatgataaacacccaaattaaaaatgttggctctgcccctatcacaacaaacataaatatcaatgacaggatcaatacgacgacaaccatagtccatacttttttaaagatgaaataccctattatccccagcataaaagaagctgccggaagaataatgagtatgatatatgcagggctcaaaaacgggctaatataaacacctcctacttattttaaaatttcgaaccgggcaatttcccactctttttttgcttttagcgggattgtttttacctttttgcctgatttcaaatcataagacgtgatatctccaagcttgttatcacgctggatatcaaagtttttgagtaaaacatacatctctctgtcattgaattgaacatcattcattaatttgttatcatccccagcataaaaatcaaaagattttttcttaaccatttttttatcaaacacctgcagcttcccctcaaaagaaacagctaagatgctatcttttaatattttcaattttgcaggatgaaaccctttctccatctcgacttctttttttaccttaagagtctctctgtctattaatatgagcttagaattctctttctcattcacgttatcattaactgccagtacaaatgtattttcatctagagcttggaatgcatccttttcatccatgaagtatatccctttattcggtatggatgccttgttctcttgcttatttgtctctgggttaattgaaaggatggacatactttcttcatcacttgaaatgacataaattttatttttagcgacgattgctgatccaagttctccgtcaagctttatttgtttcttgttttttcggctgtttcccttccaatataccagttcactttccagccctttgtctgtatatccaacgttaatgtcatggatgatataaccgtcagaactatttataaagaaagcaccttcatcctcagttgtttttgacaaactcttttcatttattttgtttatttttccggttttattgtctatcatcaagtgattattgcttctatttgatgagaagaacgtatcgtttttgttatatgaagacatcgtgaaatttataccatctttcaattccaagctatccattttagcaccatcttcaccgtaaaccccaatctcacttcccctatctaaagtgttagaaaaaccaacaataaattttgcattgtcaatatcctttaatacagtctttttattgctgcttctttcctctttttcattcccagtttggatgagaccgcaagaggttgtgactatcagtatgcaaatgaaaataaacagggtcttaagtctattcatattttcctccctttgaaatgacaaaacaaccggtgcagcaccgattgtttttgtcaatttgtttaacccttgtgataaaagattgttgtgttattggattttacaagctccattggtgttacaacgctgtcccatttgacattgtcaatatcaataccttggtttttccaagaacgccaagctaattgagaacaataaaatttagcagttgtctttttatttaaaaagttgaaattatatttctttttattatctgcttgcttttccgcatattttgcagcgtttatatacttattgttattcgatcctttaacccatagaccataaactttctttttacttccccagttattattatatctgcgaactccatcttggtttatagggctccagcttttcgcccatgcttcaactgtttttgatttgttagttgaaacaaccgcagcatgtcctacaccaatagaccaacttccagaattaatttcatagcttgtaagaacatcaccttttgtacctaacgcttttgctgcaatttggttcttgggctgatattcaggctccttgtatttaggaagaacttcatcaatttgaccagaggctttcaattctttgatttctttttgggaacccttatacaagtcttctgcatgttcttgtacatacgcatactcttctttactcatttcatagaatttctgtacttcctcacttgtcatgccggcatctttcatttcctgtatttccgtttggactttttcattagtaagttgcggaaatccttcagcatgtgcacttttcccaaatcccaagcctaaaccggaaatcaacatagttgtagagaacatggtggtaagtaaaaatttactctttttcacgtcagtatccccctattgaatatttttccttcttttctaagatataggatataaataaggttgtaaacacctttttttaattatttaggatattttaatcatttctatctagtgcataatgacacaaaatcgggatatgcagtgccaactgaactataggatttgggttttgcacgatgtttatcaggcaatgtgttgtttcactatttcttcgtaaggttacccttcaaattttatacaaatttacaagtatttgaaatgccttccaacaaacacattctaccattgatgcgaaccacaattctatatacttctttatttttatgaaatatatagaattgtggtacagccctattaaagggctgtttcatttatttcagaagagacaacatttttgctttcgttttcggtccgtaaattccatcagcagttaacccgtacatagattggaatcgtttgactgcgtttgctgttttcggaccgtaatagccatctattccgttgttctttgctcctttgtccggatagtaataaagagccgccaaagctgtctggatctgtttcacggccgttcccttagttaaggggcttgtcactttaaaaacgcctgatggcagcgtgtaagatgattttttgccttttgttggagagctggccgagtccgtctgctttaatacttggccgactttgataaaattcgggtccttgatactgttcaacctttgcagggtcgccatgctcacgccagtttcctgtgcaatgacagaaagagtatcgcctttcttgacggtgtacgtcgccccgcctgtcttggtttctgtttttgctgataagggctgggcgatgcgatgtgcgaaccacgtttgttatgaactgtcctggtccttcataagttttttgatcagccatcgctcgccagctgtggcttttcacaatctccgttttcgtttaggacggctatatgcaagcaagccgcccaacaaaaaaataaacaggcatgctgcctgtttatttttttataaccacctgcttcttaaaacagccgttttaagcttttcttgagtgacggcatttcgattttttggttttcaaagaagtttttcagcatgtatttgctgaagcccttcgcttgaccgtaagtgatttttcccggaagcggcggctcgtcgccgatgacggcgtcgatgacgaccggctcatttgagttgagcgcttcatgaaaagcgggagccaattcctcgtgtttcgtcactttgatcccttttgccccgcagctttctgcaaaagcggcgtaatccatattttgcagctgggtgacgtagtcaatgttgcctttgacccgctgttcatattcaatcatgcctaaattttcgttgtttaatatgacaaccgtaatcggcagtttatatttaacagctgtcggcagatcctgcatcaccattgaaaatccgccgtctccgcaaatggcgatggactgccgctcaggttcggcaaggcttgcggcaatcgctcccggaagcccgcatcccatcgtggcgagccagcttgagacgataaagtcctgcttcttcattttaaaatggcgggccatccacaccgtaaccgttccgacatccactgacaggacggcgtcctctgcggccgcatcctgaagccgggcaatgacctgctgcggcttgagcggatgagtcgcttcggtttcatccttttcgatttccttccaccaatgcttcatgtgctcggtgcaggcgtccaaaaatcttctgtcttctttatattcaatgtattccgtcagctctttcagccccagagccgcatcactgacgattcccgcattgacgggatagcgcttgccgattttcgccggatccgaatcaagctgaatggcgggcgtatcatccgggagataatccctgtatgggaacgatgtgccgagcatgatcagcagatcgcattcctccattgcttcgtaggcgggctttgtgccgatttgcccgagattcccgagaaagtggggatggctgtcaggcacgacgccttttgccggaagggtaatgacaatcggagcggccgctttatcggcgaatgcgagcagctcctcttttgctgattttaacccttggccggcgagaatgaccggtttttttgcgttgttaatatattgcgcgcatgtcacgagatgttcttttttcggctctatatcagctttgaggtatatcggcgatgtgtaaaccggctcccgtttgattttttgcgcgaataaatcatcagaaacagttaaaacggcaacgccttttttgctgtaagccgtgcggatcgcctgattcagaagatcgggcagcgcttctgccgtatgtacttgctggttgaataccgccacgtcctcaaacatttgctctaatttgatttcctgaaagctgtcacggccgatttcatcggaagccacctgtcccgcaatcgccagcaccggaacgccgtccgctttggcgtcgtataaaccgttcagcagatgaacggcccccggtcctgcgattgaaaggcagacaccgatctggccggtcagttttgcctcagccgcggctgccagggctgcgacttcttcgtgccgggtttggatgaatgtcaggttattccgttcatgtctcagttcttcgataaattcattaatgctgtctccgggaatgccgtatatatgaccgactccccattgttcaagcagctccgtcattacgtgtcctgctgttttacttggcatactgcatcctccttttacctgtattcatcccctttttcatacaggttgaaacacgagctatactctcagcttttttcttagcagatcaaggatggataacagatttcggtctttaaggactgccttttgatttgccgccccattgagtccgtcttttatttgccgttttctgttcggcaccatgaacagcggcagccggtttggggaaaaccagcgtaaagcggcggtttccggcccgttcatcagcggagttcccccattaatggctccgatgaatacatgttgtgtatcttcaaatgccggcctttcatactcaccggctttttgcaggatggtcacgttataaccggtttcttcgaaggcctctctgacggctgcggcttcagatgtttcaccttcttcaatcctgcccccgggcaaatcccataagggaatgtcttttcgttttacgagcaatatgtcccgcccgtcattttgtatgatgacaaaagcgccttgtgccatgtcgtcctcctttacaaaaaagaccgcggcattttagcctgcggtctttgccgttactttttaaaatgatacggcagggtggcgacgattatgtccttcttccaaaacagccggacgcggagcaagaaggctgattggttgtgaaggatggtctgccagcgttttttcgtgatgaattgcggaaacagcaccatcacggagaactgttcttttttcgctttctgttcgaccgtttctaaaaacttatcaaacgggtgaaccagactgcggtatgaggaatgcagggtgacgaggcggacgccgttatgaagttcttcccagcgcttttctacctttttttcgttttctctgtcaaaggaaacatgaaccgcaatgacctgatctgataatgatttcgcatactgaatcgatttttggacgacggtggtgacaccggcgacaggcacgatgacgacggttccccttatttcctcaggctgctgatcaacgacccgcagctgttcgccgaccgcggtgtagtgatttttaatgacgaaaaacagcatgacgacagcaggcatgaataacagcaccggccagacaagattgaacttcgtcgcgaataaaatgcacagcaccataaatgaaatggcggcgccgcatgagttaatcagcatttttactgcccagcccttcggcttctgcctgatccacttgatgcacattcccgtctgcgacagcgtaaacggaatgaacacgccgacggcataaagcggaattaaatgttccgtgcggccgccgaataaaagaatgagcaggatggacgcgataccgagaaagatgatgccgtttgaaaagcctaaccggtcgccgcggaccgtaaacattctcggcatatactgatcgcgcgctaaattaaacgccagctgcggaaatgcggaaaagcccgtattcgccgcaagcacgagaatcaatgatgtaacgccttgaatgaaataatacaccgtatggcggccgaaggtttccgcggcgatttgtgaaataacggtctcgttaggcttcggacccgtgccgtagccgtacgccagcaccgtaatccccgtaaataagatcgccagcagaatccccatcatggccaaagtgcgggccgcgttttttgccggaggatttttaaaggccgggatcgcgtttgaaatggcttcaacaccggtcagcgccgaacaccctgaagaaaaggccttcagcagcaaaaacagcgtgatgcccgccacgggcgtgccgattggtgtatgctcggccggatgaacctggcccgtcatgagtttaaacagcccgacgacgatcaaaaggacaagcgccgccacaaacagatagacgggatacgccaaaatggacgccgattctgacagccctctcaaatttaaaatcataatcagaatcacaagcaaaacagcaatgagcaaatgatacgggtgcagggccggaaatgccgatgtaatcgcgtcagttccggcagaaatgcttaccgccaccgtcagaatataatcaacaagcaatgagccgcccgcaatcaggccgggcttctcaccaagattctctttagaaaccatataagcgcctccgccttgcggataagcgtaaataatctgtctgtaggacagaatcaaagcaagcagcaaaatgagaacaccggctgcgatcggaatggaataccaaaacgcggccgcgcttaccgcagccaaaatgatcagaatctgttccgttccgtaagcaactgatgacagcgcgtctgaagaaagcatggcgagcgccttgagtttcgtgagtttctgctctccggcagcctgtgatttcagcggtttcccaatcaaaaatcttttgattgaatggtacatttgttgtcttcccctttttttcattttccgtttgatttacaaacccttactgctatgatgtctccgaatgctgattgcatgccatatttcagcacagcaaaaagacacagaggcaaacggatgcccctgcgccataatcgtgcacaggtttcattcatctcctctcatgaacgcttacgaggttagctgtcggattcgggctgatgagagttggccctacctgaaaaaggattcaccccaagcggcatcacgcgccgcaaattggttcccccgctctgattacagattaagcgatatagattataaaagagatcatactcccgtcccgttcagttgtaaaggggcttttatgctgtttcaaaaataaaaaaatcaccgccaaaaatggaaataaaaatacaaaaaaaagaggcctgttaacggcctctttttccatcattactcttcgcttttttcatgatccgcttttctttttttccttcttgccgtcagccagatcagaccggctgcaatgatcataagcgccgcgaaaacagcaatatacgtaacgttcagtgctgcggaccggctcttcgtatcagccgccggactgctgtcatcggacttgatttgctgatgattcgaaaacagctgtcggccggctgtttcgttaatgacagttgcggcatcgcttgtgctgtctaaaaagctgatcagctcttttgtgacagacgcgccgcttcctgataacggagcaaaaacagcgatgcttcggccggagtcccaaggtgattcctgggtaaacgcgacttgtttcgtcgtctcattcagcatctgaaacgaagaaacatcgtacgcgccgctgcggtctgacggcacgagaagcttagaggcgtttgactttaaaagcgggatttgcggcaggcctccgataaacacaacattccggcctttggcatccgcttccttcatgtctgatgccgtctttacggtaaagccgtttccgaatgaatccgccaccagagaaagctctttcagtgtctgcatgtttacgtcatccgggatgacgatcactgttttctctttcccgccgcccgcaaacgggagcggccattgcccgaaatcagctttctgcgccgcatcgcttaccggatacgtcagcgtgctgcttttatcaatatagacccatttgttttcgtcacggtcgacacacggattgttatgtttcaaacctgatgtgacaaattgcagatcaatgtacctgctgcttcgcaaaagcttcggatcaatcgggatggagacgtggtaaaagccgtctttatctttattgccgagatcatcaagacgcaccgcattcggctgtccgttgaccgtgacgttcagctccgctctctcggcgtcatttgctgaatccgccttcgtccggatcgattccgacgtctttaatgtaagtgaaagcttgaccttaccgtctttatcaacagcggccgccgcagggtaaaagaagtgctctgacgccgttttgtttgatccgaccgttacatttcccgcgccgaagtcctctagtgtcagtttattgcctgtcttttccgcagcgggctgaaggcggccgattgtcaaagtatctccgcccagctggcttgaataagcgctgtctgtgatgacgcggattttatccgccagcgttttgtctgattgcgccgtgacaaacaggacgggctgacgtttgttccctgatgtcagaacccgttcagcgagaagaagtttgttgtcttccgctttgatgttcccccgttcgaaaagctcgtttattttcccgttccaatgctgatcagcgccgatgacaattgacggattgctgattttgccggcgtcggattcttttacataggataccttcagcctgctgtctgccgttttcagaaatgcttctgttttgactgcggcttcagcttccgccgaggtcggtttgtcaggaaggataatatcggtttcttcacccgtattgcctgattgggcaaacggatacgggaaatggccgagatccgctccctttgacttgcttgcttctgaaagcacaaggcggctgtccggataaatttttatccagttgcctgacgtatcctgcctgacgcagacgccctcttttaatacgccgtaaaatcgtaatgatacattgtgatagccttgggcggattggcttttgctgagattgagcttcaccgttttccgcttggaactgccgtcaagctttatggatttgacgggttcatcatcaatggcgatggttaaagaagacggggcaattaataagtttgacgcctcgtaatcaatcagaagcgactgatccgcattcgaagctcccgcaggaatctgataggtcagctctgcgctgtctttcgccccgtacagtgtcatcagatcgccagtcagcgcctgctgctcttttgcgccggcgcttgttccgagggcggaaccgtccgttttcagttcccgggccgcggccgcctgcccgttatacatcaatagcaaaaggccagttatcaatatgatcgcttttttcaaaaaggtcacccgcttttattttgattgtatcgctccgttttgtaccacttgacttcctgcttgaacaagcggtgcttgatctctgtgaataatgaccagatgacgagcacgatccaagcctgggagtatgtaaagtacatcagaaatacgataaagaagttttgtttgttcatttctgttttttcaatgcttaaagtaatcatgacctcagtcataaacaggaaaaaggccagtatccacaaaatcatcgccaaaaacccgacagccagatgcaggtcgtaaaaaagattgatgataaaaatcgtgtttgacatgatcacaccgaagaaaaataaaaaatacgtaaaaaagaaataaaacagatcgaagatgatccgcttgcgtttcagcttaaaaaattgggataaaaacttgagaaccacgtattggttgccgcgcgcccatcttgtccgctgacgccaccacaccttccatgtctcaggctcctgctcccatgtcacagccgccgggaaaaagcggatatgatagccgagattatacacgcggatggtcagctcggtatcctccgccagcgccttatcatcccagccgccgagccgttcgataatgctccgcctgatcgcgaagttcgttcccgggatggtggcgattttgaaccatttccatctgccgccctgcgccatccactgaaagcagatggtttcaatattgataaacttcgtcaggatcgttttggccgcgttgatgacacggaatttcccgacaaccgctcccgctttctcatcattcatcagaccgagaaccaggtagtacaccgccattttttccggcgtgttgtccgcatcatacacgcagatcacgtctccgttcgattccgcgaaccctgagttcagcgccgaagattttccttttccggcgttcgggggctttgtaatgaccattttaatgaagtcatactgacgggaaaattcattgacgatgtctcccgtccggtcggaggagttatcattaacgacgatgatctcaagcctgtctttcggataatacagattcaccatcgccttcagcgtctgcctgatgacgacctcttcgttatgcgcgggaatgagcacgctgaccttcgggagctcccccatctttgcgcgccatttcggaatgttccgttcgaaggtcatataatgcctgaatccgccctgcatcagaaacatgtgatagagaagcatcacccatattaaacttaatgagataaaaaacagaatgttactcaaggcttcttctctccttaaaaattcgtttttttaatgtggcgcgcaaataaagaacgtagcaggcgaacatgatgataaacaataacaccacgccggagagaatccaaagcgctttttccagaggcgtctgctgatggtgattgaaaaaggccgttatcggatgaatcttgttttccacatgaatggttccgtctccgtccgttttgatcctgacgctgtccgacgttaccgtttgcttcgttttcttcagatcgagccactcgccgccgggaatccgctccatctgattgacgagctcggggaggtacttcatgccgagatacggatggtagaaaccgcccgccactccgccgccgaaatcaatcatctgcgaaatatgattctccatatctccgagcggattttcctttgagttatcggcataaccgattgtttcagggtacagcgtcatcccgtccagcatagccggctttgagacgaacggaggggcgcccgaggttttccacgtcgtgccgctgagctgcacttgtccgaaaatgctggagaaataagaagatgcgattttgtagccttcttcagacatcgtatagtgcggcgcttcgaatgacagcgggtaaaggccgagctctgtcaaatcgtcaatcgcctgcttcagcttcgttctcgtgtagattttttctttttcacggaaaggcttcacatacgcccggtacgctttttcattcggaaaatcctgttccttttcaagcttgaccggagtatcatccgcattttctgacgtaatcggctgatccgctttggcatcccaaaattcaaagccttctcccgtttcgctgtatcggtatgcgtgcgtgtagccgtgaataatgatgctgccgcccatttgctgaagttttttcaggacgctgaccattttcggtttgtccgccaagtatactttttctccgttttccggattgagatagaccggaatgaccgccagaataaacggaatgtgtcttttatgcaggtaagcgcccgcttcgtaaagcaatgtttcatctgacatcggactgatgtcttcaagccgtaaataaaggagggtgccgcccgctgattctccgaatgcgttgcgcagcgctttcgccgtcagaaacgaatcatttaacaggctcgtcacaccgaaataatagtcagagcgcgccgttttccacataaaagggcgggtgctgccgtcaccggaccggtatgtataaagggactttccttttactcccgatacgccgagcacggacatccctttttcaagcggcatgtctgttttttcttctttgccgtaaatgcggtataccgtttctttctctgtcagggacaaacccgcaaattggcggaactgtccggcgttatagccgatgctgataagctgctgcggcatactgctgatcagagacacaaatgatgtgctgagcttttttttcgtgacgccgtaatagatgacgcgccgattctttttgaggtccgcggctgtgatgtctccgtcgcttttcacggtgacggcggatgagaaatggcccgcggtcagatcaagcattttgacctcagcggtttctttgccgtccgtgcttgtataaataatgagaatgccgtcctttttgtcttttgcttccgccgtaaggggaacataaaccgccgaaatcatgaagagcgccgagagtaagagacgtatccatttagagttcattcatcatcatctcgttttccagttcatttaaaaattgctcagccgtttgtaaatcctttcggtacgccaagtaacatacacggaaggtgatggagacgtatttaccgttttgcagccggtacgtatccaattcctttttcagcttcgccagaacggccggcatgttttcttcaggcgtatgggtcagcacgatgccgaaccgttcggcggacggcctgaattttttgtctgtttcccgaacgcttgaccggatttggcggctgataaatgccagcaggcggtcggtctctttttctccgtagagggatttgaattccttgaaataatgcatgtgcagcagcaaaaagacgaaggaattgccgtagcgttccgcccgcttgatctcctcggaaagctccagcttcatccgcagatggttgtcaaagccggtcaccctgtcgacggcgacaaagctcgtaatctcttcacgcagctgtttcactgagcgctcaagccccttcgccaactcgtgaatccttcccgctatgtaagaaaagagcagcagcgcaatcccccaaatgaccagcacctgcagactttcggcaacggcagacgccataaagctcccggtctgaaaccacaggagcaggctgccgagaacaaataagacgagtaaggtgatgacgagcgcgtagattgccccgaaccatatgccggctcccgtgacaagcaatgtgatgcaggttatcagaagccctgcggattgctgagacgcatagtaaataaaaaaagacagcagcaccagcataactgctgtgtagctgcacagtttttgtgattcattgaatgatattttcattaaacaatttcctttcagccagaagcggcagcaggttatcgaaagaatgtgtatcgcccccgctcatatagccgccgtaatcaggtttcagcgtgtccagtgtttcaaatgaagtcattctttcataaagcggcttgatgacagccggatcagctttttgctctgctaaaaaaagaacggccagggcgtaaacggacggtgattcgtattgaaccgccggctccttcgtgtctgcgctgtatcgtccgtacagctgtccgcgcgtcttaaattcctttatcatccatttcgacagcacagcggctttgccatcgccccgcttcagattcacggcggcgtacagctggtcgatgacattgacttcgctgtcatatttgtattccttagtttcggtattgaacgatttcggcaaaaaaccatttttcaggggcgcaagattgagaacatcgaggttccggttttccgttttctcctcgataatccccttttctctgagcatctgtaaggcgccgggatcgacgtaggacaacgtcacggtctttgacgcggcatttgaagcggcatcataataatccgtaaaatacccgtcattcgtattgtatttttccagcgccttcccgatctgcaccgctgttttcccgtattcactgtttccccatagggttccggcctcattcagacagttcatgattctgaaatcgtcaattaaggcattggcgccgctcgctttattcccgtcaatcttccacgacacgagctcatttttcgtcagaaacgaatcggtgagaagctgatattgcgcttgaaactgccgttcatctttcctgttcagcaaaaatgccatccatagtccgagagactctgataaatattccggctcaccggttatgttcgtccggatcatcccccgcccgttcatcaatttatgataaataaaatgctctgcgggctgaagcggtccggacggttcggccgccgcctgtttttcagtgccggcctccgcgcaccccgccgtcagaacgatcgaaatcaaaaggatcatcagacgaaaaacgaattgcttcacagtctatcctcctattttataaacccttttttagacccatatcttattttttcacaaagtatttttactatataggaaacgataaaagaatactagcattttttcacattgggaaattttaaatgggagcgccgtctgctcaccttttccctcttcgtctggatcgtattcccattacagttaaaaacacaacaaaaggcagcatttctttacaaatgctgcctttctctgatctatttatccaggccgagttttttcagctgttctgccagcgcgttgttcatcggctcctctttgttttggcttttcatataagagttgatgtcccgcttggatgcgcgtccggatttatctttcgccttgcgcttttcaaagacggacagtttctcccggtggccgcatacacatgcgaaggtttggccttcgccctggccgcgaagctccattttcttatgacagttcggacagcgggcgtttgtttttcttgccagcgttttccggctgccgcactcacgatcctgacatacgagcatcgtgccgcgtttgccgttgactttaagcatcattttgccgcaatcagggcaggcggtgcctgaaatgttgtcatgtctgaaagtctggctgctgtttttgatttccttcaccgttttgcccgcatatgttttcatgtctttaatgaacacggcggatttcagtttgcccgctgcgatggcggagagcttttgctcccactcagcggttaaggccggtgattttaaatcttccgggacgagctgtaagagctgcttcccttttgacgtgatgaaaatatctttttcttttttctcgatcaagaaactgttgaacagtttttcaatgatatcagcgcgggtggccactgttccgagtccgccggtttcacccaatgttttcacaaggttcttctcttctccctgcataaaggcgcttgggttctccatcgcggataacagcgtgccttcattaaagcgcgccggcggtttcgtctgtccgctcgtttctttcaatgatgagacagtgaggcgctgaccctgctgaagatccgggagcgtctggtctttgtcttcctcatgatcgtcgtcatcctcgtacatatcatacacggctttccagccaggcgattgaaccgttttcccttttgcggtaaatgtttcgccgccgatattggctgtgacctttgtttcctcgtattcgaacgccggcattaacacggcgagaaaacgtttggcaatcaggtcgtaaagctttcgttctttgtcgctgaggcttgaaaggatcagcggctcctctgtcggaataatggcatggtgatccgatactttcgcatcattgacgaatcctttatgcgctttgacgccccgcttcagtatttgattgacgtactgcgcgtacggcttaacttccatgccgtttaaacggtcttttaaagtcggcacgatgtctgcggaaaggaatctggaatccgtccgcgggtaagtgacaagcttatgctgttcatacagcttttgaagcacggacagcgtctcttttgcggagaaaccgaagcgcttatgagcgtcccgctgcaattccgtcaagtcgtaaagaccgggagcgaagcttttcttcgccgtttttttcaattctgaaatgactgccggctttccttgcaggtcttttgccaaacggccggtcaccgtctgatcgaatgttcttgtctgctttgtttttttatcctgccatgtcagcgtcatctgatcagccgccgcgcggagaccgtaataaggaacgggtttgaacgcctgaatatccgcttcacgcttggcgatcatcgccaatgtcggagtctggacgcgtccgcatgacagctgcgcgttaaattttgtggtcagcgcgcgggtcgcgttgatgccgacgatccaatccgcttccgctctggcaacggcggaatgatacaggttttcgtactctttgccgctgcggagcttttgaaatccttctttaatcgccttatccgtcacagaggaaatccacagccgcttaatcggtttgcggacgtttgccttttcgataatccagcgggccacaagctccccttcccgtcctgcgtctgtagcgattacgatctgggtgacgtctttccggacaagctgagctttgaccgcattgaactgttttcctgtttttttaatgacgacgagcttcaaaggctccggaataatcggcagatcctcaagccgccatgattgaaattctttgccgtatccttcagggtcagcgagcgttaccagatgtccgagcgcccatgtgacgatgtagcggtcgccttcaagatatccgtttccttttttatgacacttcagaacgcgggccaagtcccggccgactgaaggtttttcagctaatacaactgtttttgacatgcttttcacttctctttctttcacaatcatcctgttattataacagacttcctcacgctctctctaatcgaggacgttttttgtgtcaatttctgagaaaatgacgtgggtcacggtttgggcatacggagaggtgcggttaatgaagtgttcgatcgtttccaggctgtccgcgttcatcttcagcatataacacgccgccccggcgacccgaaaacaaaattcaatgttgggaatggattgaatgtaggttttaaattgatcgtattttccgtttttcactgtcgcttcgacaatgcaggaaacaggaagcccgatctttttttgatcaatgtccaatgtatagcgcttaatgacgccgaaggattcaagctgtctgacacgctctgtgacggacggagctgacaatttgatttttctgcccagttcccgcatggacaggcggctgtcccgctgcagctctttgatgatgctcagatccacattatctagtttcatgactgtagtccttccttacccttttggctatattatcaagagaaatccgaaaaatgacaagaacaacaggctgaaatcatgaaggttttttcaggaacagacgcgaaatggtcatattaggactgccctttgcttatagtatagaggaaaaaagatgtccgacaggagggagctgtatgttacacacgccgatcggcagacttcgcacgatggggtttattgaaggaatgtcgcttttggtgctgctgtttatcgcgatgccgctgaagtattgggctcatcatccgctcgccgtcaccattgccggttccattcacggcggtttgtttatcatttatctggcggtgctggcgtatgcggcgtttactgtcaaatggcatgtgaaatggtcagccgccggttttatcgcggcctttattccgttcggtaattttatttatgatcgcggcctgagaaattatcaataaaaaagctcctcttctgcagaggagcttttttcatgcgttagttacatccatttcgtcacccaggcgatataataagcgccggggatgaatacgagctgggcgagaagcgtgcccgccacccttgatgtcaccatcgtcaatgatgtccattttaaggagacgtagctgcgcttgcccttcgccacatcgtctgccagtacggatactttcgggtcaacaaacacagccaacagcatagtcgcaactccgttgattaagcctgatgccatcacggcggtcgtgctgtgctcaggcgccagaaggccggcgtacagagcggacagaacaccgatcgtgtaaatagacgtaatgaccatattaatgacaaacaagcgtttcggaatcattcggaattgaagcccttttaaataggagactgacggcagtctgatataagaacgcgcatgcttcagcccgttcagtgaaaatccttttttaaatacctgcatgacggagcctcctccgtccgccaagtgtataatcgccctggagaataacgcgacgaatgtcggcaaaagacagatgccgagcatcgttccgaccgtggagccgaatattaaaaatcgaaactgggcgcccacaagagacagggcgtttgatccggcggcatcaatcagatgtccggtaaacggctgctgaaccatgtttgacatgcgcgacacgatgaccatgacattaaataatgacagcgcggacgcgataaaaccgactctcgcgccggaaagccgtgttgcataggcaagcgtttcaatcgaatgtatcagcaacagaaaacagaagataaacagtacttgtgaagtaataacgtgcaatgtatgattcctccaaatcttttctactgattagactctgcagactgcggcgaggtttcggccgtttacataaaaaaaccgcccggatgtccggcgcggttttgtcttattcttttcttacgcaaataaataatatatggttgcccgccttagcccgcgggtgattcgtattaacagttccgacagaatcattcttcgaaagtaaacaccatggaagttcttgaacacaagacaacgaaagccctacctctcaatcgtcactgcggctccgaagccgcgccggtgtgaattgtaaaacaaaaagtcttttttccatctcttcgttaggggcgaatgtcagaaggaaaagaataagctcagctttttttcaagctgtccgttgaagcctgaagcttctatatcaaaacagaaaaaagaagtttactttcttttttatttgcatgttgtcacttagcaattaagtataacagattgcccctgaataatcaaatgatttattaaagttccagctcggccggcgttttttcacccgcgttcatgagcttgatctgcttcggttcaatttcaagaatcaccaggttcggatcgtcttttccgtcaaaccagcgttccagtttcggatcccacagcttttcttttaaatcggctgagttgttcagtttggcggttccggccacttccacataagcgtctccgaatccttcacagtcataccctaacagaatatgaacattcggattgttttcaatttcttccgctttatgagtgtctttgctcgtcggcgtgtaaatcgttaagccgtcatggaaaaatgtcatgtagcgtgaatgcggtttgccttgctctaccgtcgcaagcgaaccgactttatgatgatccagtacttcaagcactttttctttgatttcattttgattcatgaagaatcactcctttttaacgtctccgcttttacttttccacattggggagacatttaaaccaagaaatgtgctcttctgccgatcttcgctccattcccgcttcagcatgctgtagttcaccgtgtcatgataggcgccctgtacgaaaatgccttctctcgtcagtccttctttctgaaacccgagccgctccgccaccgccctgcttttcgtgtttttttcagccgcgctgatcataatgcggttcagcccgagatcctgaaatgcatgggtgatgaccgcccggcagcttgcggtgataatgccgaatccttcatgctctcgatccagccagtagccgatctctgctttttgattgactggatcgacattatggatgctgatcatgccgcaaaaccggcccttcacaaaaattccggcgtcaaacccattctcttccgcgtatttatagcgccattcggggatgatcacatcgcggtacgtatcgatatcagccagttcttccgcccagctgagccattcgctgagatggttttgatttcgcttcataacagaatacaattcgtccgtatcttctttggcaagcaatctgatcgtcagatgttcccggatttgacaggaaaacacgatcacaccttctttcctttattagccattatacaggtaaattcatttttttccatacaaaaaaagatgaggcgtgcagcctcatccttaaatgcgcgggtcggtgaaaacatcgtgatcatccgtgcttgtcgatgacatttccgtgacgaccgccccttcttctcccgcttgaaaccaatgcttcgtatccggcggaatggtgtattgtccgcccggctcaagcacaatctcatgccagacggtgtagtattccttgtcttcttccggcgggaggacgcttgggttctctgtcttttcgccttccacgtagagatacaccttcccccagcggcagcggaatgtctcttgttttcccttctcgccgccgaccggcggatggcggtgttccggacacgtctgccgcgggaagagcaccaattctttcgaacagtagcggtcggtattcacgtaaataaacagctgaagcccggtttcctcaagcttgcctaagccgtaatccatgatttgaatgtcttcgacttcattatcagtcagaacgattcccgctttttgatagtatgcattcacatcatgtttcgatatcgtcatgcttcagcccccttatgtggttacaaatttgccgccgttgacatgcagcgtctgtccagtcatataagatgattcgtctgaggccaagagaacatagcagccgacatgttcaacaggctggcctgcccggcccatcggcgtagtctgaccgaaggaagcgactgtttcttctgagaatgtcgccggaataagcggtgtccagatcggccccggcgccacggcgttgacacggataccgtcgttgacgagcgcttgcgccatggatctcgtaaaaccgttaatcgcgcctttcgtagccgtgtagtcaatcagctgcggattgcctgtgtaaggattaatggatgtcgtattgatgatcgcgctgcccggcttcatgtaatcaatcgcttttttagtcaaataaaattgtgagtaaaagtttgttttaaaagttctgtgaagctgctcgcttgtgatgtctttaatgctttctttcggatgctgttccgcggcgttattcacgagaatatcaagacgcccgaattcttcaaccgttttttcaaccgcttcattgcaaaagtcttcctcaccgacatcgccggggattaacagacattttacgccttcttcttccactcgtttttttgtatcttccgcatcaccgtgttcatcaaaatagacgatcgcgacatttgcgccttccttcgcgtaagcaaccgctacggcgcgtccgataccgctgtcgccccctgtgataagtgcggttttcccttttaatttatcagcgcctttatattctttgtattcataaacaggcgtcggattcatttcgttctcaatgcccggctggcggttttgtgattccgctgggaattccttcggatagttttccatgtcaagttcctccttcttgttcgatctcatatttcttgtctacctcggcagttctccggataaacatgattgagacagttcaaaacgttttcggagaaaaatgtttcacatggaacgcaagaaaaaaacccggctggcagccgggtttttgttttcaattatgaacgtaccgcttgtttgcggagcacgtcttttctcacttttccaaggttgtttttcggaagttcgctgacgaactcaatttccggaattttaaaggcggcaagacgttcttgaaggaatcgggtcacttcttcttctgtcaggtcttctctgccgtttgtcacgatgaacgctttcggcttttcaccgtaaagcggatcagggataccgacaaccgccgtttcgagaatgcccggcacttgctgaatgacctcttcaatctggtcgggataaatattgtcgccgccgtagatgatgacatctttataacgtccggtgataaagataaatccgtcttcatccacatatccggaatcgccggtatggaaccagccgtctttcagcacttttcgtgtcgcttcttcgttaccttcgtagcctttgaataaaaacggacttgtcacaacgacttctccgattgagccttgcggaaggacttcacctgtttccggatctacaacgcggacatccacttcttccatcggtttacccgcggaagcggctttatccattcccatttgcggattccaagagctgatgccccacgcttccgtgcttccgtatccgtgcatgagcggaataccgatgtcgagatactgctggatcaggctgcttggcacctttgtgcctcccgtcatcatataaacgatagaagacatgtcagtctggtgcgtttcccatgctttcagcaggtatgtgaaatagactggcagcgccatgatggtttgaattttttctttttcgatgagcttcaggttttccacagggtcctgattgtctgtcataatgaatgtcgttccgctcatcgtgccgaccatctggcagataatcgcgctcgtatggtaattcggatggcatgctaagaagcggacatgctgcattctccccgtgtatgccaatgtcgcgttgacgtagttgtatatgccgccgtgagtgatcatgcagcgtttcggattgccggttgtacctgaggtaaacatcagcaatgccgtatcgttttcagacaccgtttcgacatccggtgtctcaccggagcctgtcaataaagcgtcaaactgaggcgttgtctccgcagctgttccggtctcgaccttcagtttaagagaagataccagcgcaggaagcacttcttccataatctctttaaattcagtgctgtaaaaaacagctttcggttcacaggctgctaaaatgcctttcatttcgtaaggtgttaattgccagctgaccggcacaactaccgcgccgatttcgagtgccgcaaacatgacaatggatgccgcgtggccgtttttgcaaagcatcgccactctgtcgcctttttttattcctttatcaagaagcgcttgtgcaagctggttgattcgttttcgatattcagcgtaggtcagggtatgcgcaccgctttttacagcttcaatctcttcgctatttgaaatgtcatgcagaatcagatgctgtaatgtctccatattttcatctcccataatgataaatcacaaaaaaactctgtcagattttctttctcacgcaacccattttaaaccaaaaaatataacttgtaaaactattttgttttagaactattccatcagtgaatgatacaatagtcccgtgtttttagtttcttcccttccccttaccctcatacatgcacaaaaaaacacaccccacatgaggtgtgcgcttcctgtttaccgctgtcctttctcctgaatgaaatgataaaacagcttgtttaaacgtttgtataaatcggcctcatcctcagtctggaaggcttttatactgtcttcggactcgatgatggccgagctgaccgcacttagtatttccgacccttcagcgggcatatcagccggcgccatcatcaccaaagcgcggtcgacggtcagggaatttccgtccatgcctttgacactgcatggagctgtcaaatcataaattttgaaaaaaggcgtgacaatttcttcatttttgagatggtacagggccatcgccgttcccggaatgccgagtccgccctgtcgttcacgctcagcaaggcgctgtgcggttttttgggcattatgaaccaatccttcttgctccagcatgtcaaacatacggttcaaaaacagttcatacgccgtgtttgaatcaatggatttgaccgaaaagttccgcagcacgctttggataaccgccgcgtaatgcgccatacggccggccgcttccagcatatcaggcgtctccggctgcttctcttctcttttaccgtttctttttttgtcaagaatcagcggaatttttcttttgatgtactgcttgacctgatcagcgtcttcttcgtttaaaagcggactgaccatgacgtaatcaatgttttcatacgggatcggaacggtggatacgatcatgtcatacgcggtgatgtctcgatccttcagttcgatgagggaagacatatcaaaggaacggatttccggaagctcttttttcagcctggatgcgagcattttggacgacccgatgccgcttgaacagacgatcagcgctttgatcttcgcttcttcccgtttgatttccaaagcggagccgaagtgaagaacgatgaaagcgatctcattatcagagaaaagaagccccggaaagaatttttccattccttcttctacggccatgtacagcagaaagtagtcgcgtttaatttgctcggtcatcgggttgtacatgtcgatattttcttttacccggttgatcgcaggctctagatgggcgattaaaccgtcgtataaagaaccgttttccgtcagatcaattttaattttttcagaaatgaagccgatcagctgcttcgtttgcaaggccgtttcaacctctatgtcttccggtttgaattccgttttgtatttgcggttggcgctccgcaaatgaatggtgatatatccgatctcagcttccggaattgaaacgccgaacgctttttcaagctcttttgccatttccagcgcagagccgtactccttcgtctgctgcagcgcttttagttccgaagcctccatcgtgatggtttctccgagcctgatccggtccatcgcaaaggttaaatgaaccgcaagcgccatgtatgagctgtcagataaggcgatcgcgattttttccttgagctgaattaagagccggtccattttcaaaagttccgctttatttacgacgccgaacattttttcagcatcgttcggttttcctttaatattcaattcaaccgcttccaaaaagctttgaatatcaaggcggttgacgatgagattgccgacgattttccgtttcgcattttccggccccgtcagctgaatgccgaagcccctttttcggatcagcgtcaagccgaagggcgcaatccaagtctccagctcatccaggtcatagctgatcgtcgcgtttgttacttgcagttcgttcgccagactgtagagcttgatcggctcttgagactctaatagtgaacatagaattaaaagtttccgctcctcagcgctgtattcatgctgttcataggacaggtctgacaggagtttttgtttgtcctccgggtttcctaccgctttcagtcctttgccaggctgtttatcaagtgccagaccgaatgattccatcatcggtttgattgttttcaactcgcggtgaacggttcttgtgctgacttgtaaagcttccgccagttcatgcactgtctcgtaccggttctgcagtaatagatgtttcattaatttttgttctctcgctgtcatatacatgaaacgcgcctccagattttctagttgtgagaagtatggcatatggggagtgctgccggggaaagtggtgtaagctataatataaaacgctttcaatgattattcaaccattttcaaatggcaatttggcactgggccgtgtgacagtattgaaaaagaaaaatgtgtcagataatatgccatgacgcttgttactcttgatccgcacggctatacttcaaagtgaccttacttgtttttagacattgcacaccacataaacaaacgcccggaagatagcttccgggcgtttgttctgtttatggaatatcgcagccttggacaccggtataaatccggaaccactgatcatggctgagtttgtacgcggatgcacgcaccgcggcggaaatgcggttctcttttccgctgccgacaatcggcatgatgtctgccgggtgggtgaacagccatgcgtacatgacttcgtcaatggaagcggcgccgatttcttcctgtacggaacgaagcgcggcacggatacggacgtccttatctgattgtccggtaaagacgctcccgcccgcaagcggtgaccacgccatcggcggaatgcgtttttcctgacagaaatccagcgtgccgtcatgaatattttccagctcgtacgccgagatttcaatttggtttgtgatgagcggatcatccaaataggattcgagcattctgtactggtgcgctttaaagttcgacaccccgaaatatctgacctttcccgagcttttcagcgcatgaaacgcttcagccaccgcctccgggtccataagcgggtccggtctgtgaatgagcagcacatccagataatccgtattcagattcaagagcgactcctccgccgacgctaaaatgtgagacttcgacgtattataatgatgcgacttgtttccgggccgttccggtgattcaatgacaatcccgcattttgtgacgatttcgattcgctcccttattgaaggcgaaagggacaaagcgccgccgaagagcttttcacacgtataaccgccgtatatatcggcatggtcgaaggtggtgatgccttggctgatacaccattcaatcaaattcagcagctctccgtctgaaacattccattcgttcagacgccaaagcccgtgtatcactcttgaaaattccaggtcttcagccaattgaatgcgctgcatgtgagatccccctttttcttagagcctcttgtatctctgttttcaggaattgcccatgctgtttcattctgcttcggcggccgattttcctttcagcccgcaaaaatcgtcatttaatgattctgaaactgctttttcgctttttcaacgacgtaatggcttccgccgcgttttttgacgtcttgaatcatcatcgcgatcaagaggtctttctttttataatcgtaaccgacaaaccagccgttttctttgccgtctttatcttctttagacgttttcagctcggctgtaccggttttcccggctacggtaatgccgcttacggccggctgatatgcagagccgcgcggatcttcaacgacgcctctcagcccttttgtgatttcttcggcattggctttcgataccacttgcttatgccagatttgcggtgttttttctccgtctttgatcaatgtcggtttgacgagatttccgtctgttacaaatgcggtatagtcagccgctaagtgcagcggagacatcagcatctgcccctggccgtagcccgtatctccgagaaggatctcggaatcaagcttgccgttagcgattgaagacttttcaatcggaaattggtacggaatctcttcatcaaagccaaatgtttttaatccttttgtaaacgcgtccgctccggcatctatggcattttgcgcaaagtagatgttgtctgatgtgatcagcgcgttttcgagatccacttcattcaggcgctctgatacgcgtgtgacatggtaaccgccccagctcgaatctttctgccactcttttccggtgatttttttcttttctgacgctttcaatgtgccgtttgtcaggccgactgccgcggcaatcggtttaatcgttgatcccggcgcataaagtttgttgaatttcgctgaaaacggattgtttttatcttcattcagctttttccactcttttccgctccagccgaaaagaaagccattcgggtcataagacggtgcgctgacgagcgcgagtgtctctcccgtttgcggttcgagggcgactgccgctccgctgtcatctttcatagaatcatacagcttcgtctgcgttttcatgtcaatcgttacatgaatatcctgcccgctttcggctttcttttcagcaatgacctcacctgtttgcgggacgtaaattttccagccggtcgtgccgcgcagcttgtcttcatatacattctcaaggccggcgatgccgattttggaagtatcgctgtattggccgtctttcgcttttttcagctgctccgctgtgatggttttaatataaccggtcagatgggccgctttttcgccgtacggatagtagcgggagctgactttcgttttcgtcacgccgtctaatgcgagcaggcttttgaccttgctttcatcatccggtctgattttttgaagcgggacataggagtcgtcttttacccagccctggttcagtttgcttttgatatcgtcttcagaaaggtccagtttttcagacagttttttgatcacgctgtctttatccttgccgagttttccagggataatgccgatttccggcacctcggtattcacggcgagaccttttccgtctttgtcgtaaatttgtccgcgcttcggttcttcatttgcgatctgcacggttttgtcatcggaaagctgtttgaaaataaaagaaggattccagtcgatgttccatgattctccatcgtctgttttttcttttttcaggacggccgtgttttcaaaagcgaccttccctgcttttgtatccatgctgactttataatcgatgtgctggaggtcatcttttttcttgtcgtcttcgtcctgtttttcggcagtgactttcagatttttgacccctgcttgttcataaacggtttcatatcgctttacaaaatcctttttggatcgttttttcttttcatcctgggtgaggctttggtacatcttatcgtaatgaccgccgttccagtcttttacgaaatctttcattctgtcttcggccgattccgttttcgagcagccgatcaaacctatgattcctgcgagtaaaagtaataggtataacccttttttcactgtctattcccctgccttccaactgttattttctcctaaaccaaatcaggctggcaaggatttttttctcatattgtttaaaatttttttgtttttcctgccgtcacgggccatattcttatacaatgtatctattaaaaaaagggggaatttcagatgatcagagaagcagccatgctgtatgtaaaagaaggtcttgagggggaattcgaagaggcattccgccgggcggagccgattatcgcgggcatgaaaggttatctgtcccattccttgtccaaatgtatggaaaagacgcataaatatttgctgcttgtggaatgggagacattggaagatcatacaaaaggctttcgcggatcgccggaatatcaggaatggaaagccttactgcaccgtttttattcaccatttcccgttgtggagcattttcaggatctatcagcctcagatcgcgtgaagcgtaaaaccgattaaggagatcgaccatacaaaaacggcggtatagatattgaatttcccggagccgtcgttttctttccgtttttcctccagcccctgaatgaacatgaccgcaccgagaaacacgagcataaccggctgtatgacagaggtatgttccgcatacgtaaatgcggcggccgcaagtataataatcagcatcgcgagtgacagttttaaggcgcgcagcaaagcaatccatcctttctgttatcattttttgaacacaattctatttctgtctttatcccccattattctagcgtattttttgcgcggatagaacgaaagtcggacaattttaagtttgttttaaggagcacgaaaagcgcgctcccgataaaaaggagcgcgcggttatgagcgggcgagggttccgtatccgagcccccgcaggacgcatgccatgacttcataccccttgctgttggggtgtacgcggtcatgagagagatattcattcatttttcctttgaaagcgctgtggacgtccgcaattttgacgtgcggcgccgatgcgagtgtgctgaggtgcgcattataagaggatatccatttttctgcaatggagatgcccgggaaaggattgtataaattgaagacgcggatctcataaggagacgggtgcggcccttttaaggcagcgatcttggcaatcatcttttcaaagttctcatggcagtgactggacacgctggtgaacaccgaagcgtccgatgtttgctgatatgcctgaaccgaatcgatcaaatcgttgccgcagcctgtaatcgtaatcatatcagcagcctgaatccgcctctgaatgtacggcaaggacataagcccgagaatttctcccgtctcaaggcctgatttggcaaagatggatacgtcagttcttgtctgtaaatcttctgccatcatacgcccaaaccgctggacaaaaccggcggaaaacggcccggatcccctccccgtcgtcaaagaatcccccagcgccgtataaacaagtcccatttactttcctccactcgttactatcgatattgtaatgtacgcgagtgaagaaaaattggctcggtcaataacccaatttctcagaaatatgctgtgcggcggttttgaccttttcggttaaatacggcagcctatcctctgaaaaccgggcttcgaagccggcgatgctgattccggcagccaccttaccttcgtgattgaaaatcggcgccccgatcgccgccgtgtaatcttctaattccgaatagctgatcgtataacctgattgtaaggacctttcaatggattgaagcagttcagcccgatccgtcatcgtgcctgaggcgattgcggcaagctttgtcttctgaatgtatgtgtcaatctcctcttttggcagaaacgatagaatgcttctggcgcacgctcccgcgtacagcggcgaccggcggccgattgccgtatacaggcggacggtttgagtgccttcaattttttcgacgtaaatggcttcatctccgtccctcatgatcagctgaacggcctcatccacttcgccgcacagctcttccataatcggtttggctattttcctgatgtccagacgttcagagacgagctggccgaattgtaaaaagatcagaccaagctgataacggccgtccgctgcccgggtgagaaatcccgtttcctccagcgagcttgccatccggtgaaccgaggtcttcggcatttccgatagagaaaccagctcatttaagctcaggctcggttcagtcagaaataaatgaagcagttccattgatttgatgacggttttgtttttgttttccatggtctttagcccctttgtcagatcagccattccattttgagccttgctttcagctccttcagctgctgttccttctctaaaagcagcatttccgcttcctccagcgaaacggcccggaacgtgatatgttcccccggcatcgtttgggcgacgagaggaagatcagcggatatgatatgcgccatccgcggatagccccccgtcgtctgtctgtcagccagcagaataatcggattgccgtccggcggcacctgcaccgttccgaacgtcacggcctcagataccatctccagcggctcccgcaattcaagcggagcgcccttcagccggtagcccattcggtcggattgaggcgtgaccgtatatgactcttgataaaaacgcaattttgcttcttctgtaaaagcgtgaaattgagcgccttcaagcactcgtatgaccggattttttttcagcggcagaaatcctctgctgctgacagaccaatcaggcgctgagaaaccatgctgtccgaaagaatcgctcagacggtacgcgattgattccgaacatggcgtcatacggccgagcggcagctcatcatctttttgcagcgctcttccgcaaaaaccgccgatccccgctctgacatatgtgcttttgctttccatgacggcgggcacgtcaaatccccccgcgacggcgagataagcgcggctccccatcttgcacggcccgaatgagacgacgctgttttcctttatcaaaaccggtttccacagaggggcgggctccccattaatatgaagggcgaaatcagctcccgtgacggcaataaccgcaggttctgaaaattcaaaggaaggcccgggccccatgagcgtaatttccagtcccgcctctttttcttgatttccggcaagaagattggcgatgcgcagtgagatcgtatccattgcgccgcttcccagcacaccgtatttctgatatcccgtccgccccttgtcctgaaccgtcgtcaagagaccgggctttaccactttcatactcattcggctccctccttgatgcggctgtactcctctgccgtgatccggacgaatttcaccgtatcgcccgctctcaaaagactcggcggatgttcttccggcctgaaaagacggagcggggtgctgccgatcagctgccagccgccgggagtggatatcggatacacaccggtctgcattcccgcgattcctactgaaccggccgggatggacggccttggcgacgcctttctcggcgctctgatccgctcagacattcctcctaaaaacggaaatcccggcgcaaatccgagcatataaacgagatattcgccttcagtatgaatgcggatgacgtcttccagggtcagatcgttcatctcagcgacctcttctaaatcgggaccgaaatcaccgccgtagcaaacggggatttccatcacccggcgctcttctttgcggccggtcattatatggctgagacgttctgtcacttctttcttgaccagggcaaaaggagagacgcctttttttatgtttgagacggcatacacatcataaaagatcgttaagcttgtgaatgccggaatacattcaacgaagcccggaaacggccgttcttccatacaggctgccgccgcatgcacccggctgttgacctcttcgctgatgtgcccgccaaagcggatgataacggcggaatcaccgtacggctgtatatcaagcgctgtatttccgctatactgcatcattgtcatcacctcgttgtattctttctcacttacaggacagcaagcgattcatttcgtatatcggtgatcagcatgtgccccggtgaatgtgttattacgatgtcaggctttgcttccatgatcaccgcctggggcgtaacgccgcaagcccagaatacgggaacttcaccttcccgcaccgttacggcatctccgaaatccggctgatgcaaatcgctgataccgatgctttgcggatttccgatgcggacgggggcgccgtgcacggcgggaaaacgtgacgtgacctgcgccgcgcggactgcaagcctttccggaatcggtctcatgctgacgaccatctttccagaaaacgggccggcgggaacacagtcaatgtctgttttatacatggggacattcacaccctcatcgatgtgcctgattggaatgtgctgattaataagggcttgctcgaatgaaaaactgcagccgattaaaaacccgacataatcatccttccaatacggcgtaatatccgttacctcttcagtaagcacgccatgccgataaatcctgtatttcggaaagtccgtccggatatcagctcccggcgcagctattgccggaacgggtgaacccgcatccgtcacatcaagcaccggacaaggcttttgattgcgctggcagaataagagaaaatcaaaggcaagatccttttgcaaaacgacgagattggcttgagcgtaagaagcggccatccccgccgtcggcccggtcatctgccccttcctgatcagctgtctgacttcttcggggctcatgtcactcatatggtttttcatatcatcagctccatagctgcggcatctgcgtgaataatgtatagatgcccataaccgccatgacaaccactacgatcgcccctgcaatcgtgagccagatcggatgcttgtaatcgccgacgatttttttcttataagcgcccaacagtatcatcgctaatgcaagcggcagaattaagccgttaagcgaaccgaccgcgaccagaattttggcaggctggccgatcgtaacaaaaataagagtggatacgatgataaaaccgataatgacgccatgtgagtgcttttcgatttttgttgaaaatgatttgaaaaatgataccgatgtataggcggcgccgatgacagacgtgatagcggcagaccacatgatgacgccgaaaattttatagcctacatttcccgccgcaagccggaatacagaagccgccggattatcaggatcaatgctcaggccctttgagacgacgccgagcacggcgagaaacagggcaatccgcataatcgatgtaatcagaacgcctgtgatggagcttttcgtaacctgagggaggacttccttcccttggatgcctgaatcaagcaaacggtggccgccggcaaatgtaatgtatccgccgaccgtgccgccgacaagcgtcacgatcgccagcacactgatatgatcaggcataaaagttttcacaacggcgtgtccgaccggcggagccgtcgttacggcaacatacacagtcaatacgatcatgacgatgccggcgatctgcataaaacggtccatgacttttccggcttcctttatgacaaaaatcagcaccgcgaccgctgcgctgattaaagcgccgatctccggtttgatcccgaataatacttgaagaccgagacccgcgccgccgatgtttccgatattaaacgcaagtccgccgagcacgaccagaaaagcaatggcataaccggcgcccggaagcaccatattggcaatctcttggccgcgctttccggaaaccgcgataatccgccatacattggtttgcgcgaaaatgtccaaaataatagaaattaaaatgataaagccgaagcttgccgccaatgtattggtaaacgtggccgtttgcgtcagaaagccgggcccgattgatgatgtcgccatcaaaaatgtcgcgcctaaaagaagcgaccatttgccggaagcctttccggctgtttttttcttttgctccatgctgtcttcctccctctgctgctcagtcttttgaaagtgcgctgatttgaatgtttgccgcttttaattcttttttgattgtttttgcgaatgtgagggcgtgggctccgtctccgtgaatgcagaccgtgtccgctttcaggcttacagcttgtcccttacgtgatgtcaccgtgctgtctttcaccatttgaatcacttgaccgaccgcttttttgtcatcctgaatcagcgcatccggctctgaacgcggcgtcagcgtgccgtcttcctgataggtgcggtccgcaaacacttcgcttgccgtcctcagtccgattcgatctcccgctttaatcagctcgcttccggaaagcccgaaaagaataagcccgggatcaaaatgacagaccgcctgagcgatggcttctgacaggccgggattgacggcggccatattatataaagcgccgtgcggcttcacatgctgcatctcgacaccttctgcttttaaaaaccctgacagcgcgccgatttggtacagcgtcagatcatacgcttcctcgggtgtaatcgcgatctgccgccgcccgaatccctgcagatcgaacagcccgggatgagcgccgattttcacgcctttttccgccgcaagcgcaaccgttttgcgcatcacgctgggatcacccgcatgaaagccgcaggcgatgtttgcagatgtcacataatccaaaatctcttcatccagcccgattttataagcaccgaaactctctcctaaatcacaattgatgtcaatctgaaacataagatccctcctgtattgtaaacgttttatatgattatcattccgctattcggaatgactattccgaattgttggatttctcttcattatatttatttctgacaggtttgaacatccttttgtcagaaaacctaccatggacctagtcacaaatctgacaaaacaaaaaaagagagcctcatactgagactctctcttttttctattataacacccagtggcggatcgctttggcgaccccgttttccgtgttgacatcagtcacccagtcagctgtttctttcacaatgtcctgcgcattccccatggcgacgccgacacccgctttttcaatcatggcaatgtcattcagactgtcacccatggccatcacattttccatcgtgaagccgagtttttccgataccttcgccagcgcagccgctttgttgataccgagggcattgacttcgatgttgatcggactggagtttgtgatctcgagctccttgtattccttgagctctttcagcacctcattccgcacttcgtcatcctcgatttcgaatccgaacttgagccactgatgatccgtaatcgtttccgggaattcccctctccacactctatcgacggtagaggcccagaaattcgtgttgtgcttattcctcagatcccataatttttgaatatgatcggtatgaagaagcttgcgctcaaccagctcaaagtcggaatcccagatttcgctgccgtttgccgtgattaaaaaggatgacagctcgagagactcagccagttcgcggcaggtcatcagcgtgcgtcctgtgctgatgacgacgtgaattcctttcgcctccgcctccttgatcgcccgccggttttcttccgggatgagctgctcgtcattgagcagggttccgtccatatcaatcgcgatcagtttaatatctgcgtcttctctttgtatcggcatatatgtacctcactttttataatgtagtcgtctctattttaatacatatgacccacaggaacaaaaaaccgctttctgcgtttggcggggggaacgttgaggaaaagaaatattgaggtgatggaggatgaaagaaagaaaacaaaagaacaaaccgaatgaaaatcctgaacatcatgatttaaccgatccgattccgctggaagagctgaaggaaaacgccaatgacgaaaaacacaaacatgaccaaagggacaattcacaaagtgaaagagattatgatacaaaataacagacttgtacgaaagccgccgctggaggcggctttttttacgatggctggataaatatgctgagctcagcttccgccacaggcttcccggcaacggacgctttcgcccggccgaacacaaaaccgcgtctgattcgcgtgacctcaaaaaaaagatccagacggtctcccggcaaagcggcacctaacctttccgctttcttcaccgcggataagagaccgaggccgtcaccgccggtaattcccgcgcaagccgccgtttgggccattgcttcaacgacgagcgaaaatggcatctctctttgggattcagttataaaccagtcattttcactgatgtttttgtaagcagccgcccattttccggcttcactgttcgtcgtgccgtccatcaaaagaaacggaaaacgatggggcaatagcttctgattcatcacgcagcctcccttctctctcattataacgcaagaaaaaacccgcgtcccccgacgcgggttcatttttattgattgagctttttgagcacgatgccgtgcagcggttcatgcggctgaataccgcaaatgtcttgaagaacgccgctcgtgcctttttccgcgataagcttttgcagctcaaccgcttccggatcatcctgatagtcaaaacgcaaggcggcggcgatgccttctgccagcgcgttcggttcttttatttttttggccggccctactaatctgtcattcgctccgagttttctgagcggtgatctggcgactcttgtcacatcatccgtgatgtattcattttcaaagcggccgatgatttttttcatgtactgctcgtgttcggcttgcttaaagccgtacgctttcactaagtactcgcccgtttctgaaagtgcatcgtacacgacacgccggatttccggatggccgatggcctctttgacagtttttaatccgcgctgatagccaacgtacgccgtaacggcatgaccggtattgacggtaaacagctttctctcgatgaaaggcgtaagatcatccgtaaacaacgcaccttccagtaccggctggccgccggcaaagccggttctgtctatgacccattcaaaaaacggttctacggatactttcagcggatcttcatggtgctgaatcggcacgatccgatccaccgcagaatccgggaagccgaccgtccggttcacgaattcccgctccgcttccgtcaaatgtccgaaaacttcttttttcagaaaactgctgccgccgatcatattttcacaggcaatgatattgagaggctcagaggacgttctgcgcttcagcccttccgcgatggacggggcgatgagtctgagaacgttcgggcccaccgccgtcgtaatgatcgccgcttcattgatcagcctgtacagctcttgttcttgcaccgcgctgttgatggctgaaacggggccgatgatttctgtctgccggccgccgtcggcaagctccacggtatattccttcttttcattgagaaggctgaccatcgtttcattcacatcagcgaaaactacctcatagccggaatgatggagcagggcgccgataaagccccgcccgatgtttcccgctccgaaatgaagggcaatcatgtcagttcacctcgctgaaaatagcggccagttcttcttccgtctttgcactgatcagccgttcgatgttttcttcctctgagcagatgatggcgatgtttgacaggatgtctaagtgttcattgttttttccggcgataccgaaaacgacctttgccgtattgccttcaccgtattccacaccgtccggaatctggatgacggaaatgcctgaatgaagcacctcatccttcgcatcttccgtgccgtgcgggatcgcgatgaaattccccataaacgtggatgatgtttcttcacgttcgaacattttttccacatagccgttcttcacgtagccgttatcaatcaatgtctgtcccgcgaggcggatggcatcctcttttgagttcaccgtctggttcagtttgatgttcgctttagccaatacttccatgatgaagatccctctttctgttgattagtttttaagcttttcaatcagttcatcgtatttcgggctgttcaagaaattatcaaccgaaatgtgcaccgcctgcggcagcttcgctttcgcgcggtcagtcaggtccttatgcgtaatgacgatatccgcgtcattcggaagattattgatcgacgtatttgtcacatcaatatccaggtctgcttttttcactttgtttcttaaaatggaggcgcccattgcgctcgatcccatacccgcgtcacacgcgaagataatgcggctgacttggtcggcggaaatatcagcggcgctgttttccggctcttcctctttgtccgccaacgcggccgcagcttcgcttttcctgcctttcatttcctgcattttttccgccgcggctgtcaaatcttcttcgcccgctttagacgatttcagaataagcgccgagacgataaacgatacggccgcggcaacgatgacgcccgccagcacgccgagatagcttcctttcggcgtcagcgccaaaatggcgatgatgcttcccggagatgatgcggcgacaagacccgcgttaaagatcgagaatgtaagcagtccgctcgctcccccggcgatcgccgcgaggatcagcatcggtttcattaaaatgtaagggaaatagatttcatgaatccccccgaagaaatgaatgatcgccgctcccggagccgtcgatcttgaagagcctttcccaaagaacatatatgccagtaaaataccgagtcccggcccggggttcgcttccactaagaacagaatggatttacccgctttggcggcctgctcgattccgatcggacttaaaatgccgtggttgatcgcgttattcaggaacagaactttcgccggttctacgaaaacgcttgcaatcggcagcaaattcgcgtggacaatgacttccacacctgccgccagcaatttgttaagagacaggacgaccgggccgatcgcataaaatgcgataatcgtcagcacagctccgataattcccgccgtgaagttgttgatcagcatttcaaaaccctgtctgactttatctttaaacacacggtctaattgtttaatgagataaccgcccaaaggccccataatcattgcccctaagaacatcggaatgtccgctccgacaatgactccgatggcggccgtcgctccgacgactcccccgcggtgatcgtaaatcatttttccgcccgtatatgcgattaaaagcggcagtagatacgtaatcatcgggcttaccaatgtattcagctgcggattcggaaaccatcccgcaggaataaacagcgcggtgataattccccatgcgataaatgcgccgatattcggcatgatcataccgcttaaataactgccgaaccgctgtatcttcactttcatgccagcttgctgttcttgctgcatgttcattccctccctgtttgcttgccttcagatgaaaataaataagacacggggtttctctctcccctgtgtcttcatcataaaacgcttacaatccccattcaatgaaaagtaaagaggagtttggcacagagactgtgacaactccttaacaaaaaaaagacacctcatcaaaggtgtcttaccgctttctgtatataatgtgtccttttgtgacgacgagtttggcaatgagccgctcactgacaataaacaccggatacgcacatacgagcgcgaaaatggcggccggcacataccgcgctgccggaaacatcggcatgacggcggttctggccatctgcacaagataaatcaaaagcaccgtgatcgcaatggccgcagccataatcggagctgatactttatattcacgcaatttcacatggcaatgcccgcactgaaactggcacgggatcatggatgatctgaccatgtcgcctgtaatcggcttgccgcagttcgggcaggtcgtttctttcatgtttattcctccattcaactcttctattataacagagtctgactacgtcttttacatttgtgattgttcaacattttttcacatattttatcatcaggctcttgtgtgcatttgtgaaaacatctactcttagagggaggttcatcactcattcgcataaaaaggaggatgcagaattgcttccgattcacagacagcaaaccttgcttgaatggctgaaagaagagggcgcgctgaaaatctctgacataagcgagagattcggcgtctccgagatgaccgtgtacagagacgtcaatcagctggcggatgcaaaccggattatccggacacccggcggcattacgctccctcccgcttcagaacgaagcgccaatcaatgcggctattgcctgcggccgattcagcattcgtattctgttcagcttattaccgtttcacaagccgttgagcagatgtgctgcattcattgcgcgattttgcggtatgaggataaaaaggaagaagtgtcccacgtcatttgtaaagattttcttctccagacgacgctgacggccgcttccgcatactttttagtccatgccgatattgaccttcactgctgccggcctcaggcgattcccttctcaacgcttgattacgcagaacggtttcaaaaaggattcggcggggtcatttgcacctttgacgaggcggcggacatcatcttacacgacaggcagaagggatgcacctgcagcaagacataacaacaaccaaccggaaggcggtgtcatcatccatgagacagaacaaacgctggctcatctttttgctgttccttgttttgattccgaaaacaagcttcgcccacgcctacatcacaaactcaaatccgggtgagaacagcgaattaaaacaagcgccgaagcagattgaaattgagtttaatgaacagattgaagaaggcttccactccattaaggtctataattcatccggcgaacgggtcgatgcgggaaaaacggtgattcaaaaaaatgatgcccgcatcatgaccgcggcattgaaaaaaaatctgccgcatgatatttacagagcggaatggaacgcggtatcggccgacggacatccggtatccggcgtcatccctttcagtatcggaaaagccggcggagaacttcgggagcagacatcatcgcaagcggcgcttcatcccgaagcggccatcgaccgcggtattttgtacaccgctctctccctgtttatcggcacggcttttttccatctgttttggtacagaaataataaagattcatcaaaagcaaaacgaactgtaaagctgctcgtgatttctttatgtgtaacggggctcgcgcttatctgccagctcccgatccagacgaaagaaaacgcgggcggcgcttggagcgccgcgttccagccggactatgtaaaagaaacgcttctgaaaacggcaggcgggtacgtctggatgatccagattagcttatttatcctgctcgccctgtccatgatcccgctgttgaagaagaaagcattccggtcatttgcgtactggacggcgccgctgttgttcttcttcgcttcgcttttggcaaaagcattcgccgggcacgcggcggtcattgacgaaaaagcggtcggcatcgcgatggactttctccatttatcggccgcgtctgtatggatgggcggtatcgccgcgcttgtgctgcttctttcatcagagtggagaaaacccgataaaaccatcgcttgggaaacggtcagacggttttctccttgggcgttcgcctctgtcggtgtgctgttattttcaggtgtgctgaacggatttttcattatccgcacgtttgattcactctttcacaccgcttacggtaagacgctccttttgaaaatcggactgttcgtcatcatgcttgtgctcggcgccgttcacgtatggatgacgaagttcagcagaaaaaggagcatcagcgcaacgataaaggccgaatgggcactaggcatcgcggtattatttacaaccgccgtcttcacaagcctgcccagcccgccgccgcctgcgccattgccttttaacggctcagaaacgatcggaaacggggaaaccctgtccttgcacattacgccgaaccagccgggtaaaaatgaatttcaagtcattgtcaccgatcacaacggcagcttggtaaaagacattcagcaatttacggtcactgtttaccagacgggcttcagcggcaaacagcatgaaagcacctttgatttgaagaagacgaaggaaggcacattcgaagccgctaacctgtccatcaccgaaaagggaaactggaagatcaaagtccacgggctgacaaacgattttaatgaaatcaaccaaatattctcaacgacaaactaaggagtgtatctcatgttgaaaaaaaaggctttattattcatatccgccgtgaccctgtcactcgtcggttttacggcgacagcaagcgcccacgtctcagtcaaacccgcggaatccgcggccggttcctgggaaacctacacgatgaaagtgcctgtggaaaagaatgagccgacaacgaaagtcgtgctgaaaatgcccgccggcgttgaatttcagcagtatcagccgattccgggctggaaaacattcgtatccaaacatgatgacaaagcggtctccgtcacttgggaagcaaaagacggcggcattcagcccggccaattccagcagttcacgttcgttgcgaaaaatcctgaaaagagcggagatgccgcttgggacgcttaccaatattacaaagacggcagcattgtagaatggacgggtgatgagaaagccgacacgcctcactcgattacgaaaatcacgaaatcggccagcgtgacggatgcgcacggagctgaacagtcaaacgtagaaagcaaatccggcgtatcagcgcttgatattgcagccatcgttctgtcagctgcggcgattatcctttccatcgcggcgcttgtaaagaaaaaacgcgcgtaagcaaaaagcgatccggctctaaagagcctgcgatcgctttttttcttatccgcggcctgcctggaatgacggatatttggtcattcccccgtcagcaaacagcgtaatgccggttacgtagcttgattcctttgaagcaagccagacggcgacagccgcgatttcttccggctcaccgatatatcccatcggaatcatgctttccacatcttttttctgaacgggatccgcaaatttttccgcgttgatcggcgtattgatggctcccggcccgatattgttaacacggatgcgcttcggcgcgtactcaagcgccagcgtttccgtcatcaatttgatgccgcctttactcgccgcgtagtgaacaaacagaggccatggaatcatttcatgtacgcttgacatgttaatgacgtttccttgaatatcattctctacgtaatatttaatggcttcgcggcttcctaagaaagcgccggtcagattggtattgatgactttgttccagtctttgagcggcatttcatgcgactgaaccggattttccataccggcgttattgatcatgacatccaatgtgccgaattccttcaccgcggtctgcacgatgtttttgacatcttcttcttttgtgacgtcgccttgaatgatgaccgcttcgcctcccgctttttgaatctcttctttaacggtttgggcgtctttttcattactatagtagttaaccacgactttcgcctgctcctgtccgaagcggatcgccatcgcttttcctaatcctgatgaagctcccgtaatggcaacgacttttccttttaaatccgtgtacatgttcaaacctcctgcatttgttatgaatttgatttcgcaacgcctaagaataccgcggccacaatgatcaggataatcccgatggcaatggcgaccagctgacgcttcgttttgctctcacggagaatgaagattccgccgagcgtgctgatgacgatccccatttgagagagggaaaaacttgtcgcaactccgacgcgcggctgtgagatgaacagaaacatattcccgagcgcccagatgattcccggcagaatgttcttgagggcgtacttattaaacggtttatgcttgtacgtcaggagcagtccgccgatgaccatcccgatcgcctgcggcaggagcgctgaccatccggatacgccgaacagccgggccacaacgacatagaccaaataaccgagcgtggagatcagcaggatgacaatgcctttttttaagtttcccggttctccgtccgcccgcccctttttatcttctaaagatgtgagcacaatcccgatgatgataaaaataagggcgagaatacccagcgtaatcgcgatcggggttgaccattctttgaatacgatcacaccgaacaaagaagtcgagacgagctgcattcccgttgatatcggcatcgtttttgaaacgcccatcagctgtatgcttttaagctgattgctttggccgagtgaccaaaacagccccgagatgatgccgacaataaaaatgcgcccagacagcaccgggtggacaaacagatacaacacaaacgaaacgatgagcgccccgattgtcgttcccagcgtctggctgtaaggcccgccgcctaatttgacgttaaataacacgatgctcccccaaaataaagccgggagaagagccaataatatatccatgatggcgaccttctttcaatcgtatttgctgttattttgtctggaatcgaaccgattattcccgcaagatcaaaaaagcctgccggcgatattcaccggcagactgctcaataaaaacagccccgcttagaagcggggctttcttttcggctcattaaagtccgatagacatgtatttggtttccaggtacggctcaatgccttccgtaccgccttcacggccgatgccgctttctttcattcctccgaacggcgcttgaaccgcggacggaccgccgtcattccagccgatgatgccgtattcaagctgttcagaaatatagatgccgcggcggtagttttctgtgaagaaataagccgcaagcccgaacggcgtatcgttcgcaagcttgatcgcttcatcaatatctgagaacgtaacgatcggcgcaaccgggccgaatgtttcttcatgcatgatgttcatggatgtatctacatttgacagcacggtcggtgtcacgaaatagcagcctttttcatcgttttggtcatacgttccgcccgtcagcacttttgcgcctttttccacggcgtcattaatttggccgacgattttatcgaagccttttttgttgatgacagggccgacgtttacgcctttttcaagaccgtttccgactttgagtttcgcagcttcttcactcagttttttcgcaaactcgtcttttacggattcgtgtacgatcagccggttcgcacagacgcaggtttggccggcatttctgaatttagaggccattgtttgggctaccgccagttcaagatcagcgtcttcatccacgatcagcggcgcatgtccgccaagctccattgacatatgttttacggtgtcggcgctgtttttcatcaggattttgccgacaggcgttgagccggtaaaggtaattttgcggattttcgggctgctggtgaagacgtttccgatttcggctccgtcaccgatcaccacttgcagcacgtccttcggaattcccgcttcatatgcgagacgcgcaagggcgtaagcggaaagcggcgtatcctccgccggtttgatgatgaacgtacagcctgccgccaaagcgggcgcggcttttcttgtaatcatcgcattcgggaaattccacggcgtgatcgcggctaccgggccgaccgcctgacgggtgacgacaatccgtttgcccgttgtcggcgcaggtactgttctgccgtaaatccgttttgcttcttcggcgaaccattcaatatagccggcgccgtataaaacttctccgaccgcttcttcgtacggtttgccgttttctttcgtaattaattccgcaagttcttctttattttcaacaatcagctcataccattttctcagcagtgaggcacgttctcccgctgatgttttggaccatgattgaaacgcttgatgtgaacgttcaatcgctttttcaacatcttcggccgtctgctgggggatgctttcgatcgcctctcccgttgccgggttgtacactgttaattgttctggcatattgaacattcctttctctgctatagtaaagccattgaatgctagttgatgtatctcacactttcatgatagcagacacatccgccggcattccaataattgaactcacagagctgcttcgataatggaaaggccttctttgagctgctcatccgtcacgacaagcggcgtcaggaatctgataatgttgccgttaatgccggccgtcagcagcagcagtccgttctcgttcgccgttttggcgatcgccgcggcttttgctttgtccggttcccgcgtgtccggatctttgacaatttcgatggccgccatcgcgccgagtctgcgcacttctccgatgcaggcatgctcttttttccactcgagcgcttgatgctcgatgatccggccgatctcctcggaacgctgattcagcccttcttcttcaataatatccaagaccgcaagcgcagccgcacagccgagcgggcttcccgcatatgtgcccccgagttcccctggcgcggcggcatcaagcatttccgcccggccgatgacgccgctcagcggcaatccggccgcaagtgatttggaaacggtgatcaaatcaggaacggccccgaaatgttcaatcgcaaaatacgttcccgttctggcaaaaccggtctgaatctcatccgctacaaaaacgatgccgtgttttttacaaaaagcggcgacgtgctgcacgaaacgttttgacggaatgatgaagccgccctctccctgaaccggctccatgacgacacaggcgacggtttccggtgcaactgcggcgataaagaaatcctcaaaagcgctgatgataaagtcgtcatactgctcgtcgctcatgccggccggcttttgataataataaggaaacggcgcctgatacacctctgaggcaaacgggccgaaaccgaatttataaggcttcaccttgctcgtcatgctcatcgtcatgttcgtgcggccgtggaaccctcttgtaaatgacacgacagcctggcgcttcgtatattttctggcgattttcacggcgttttccaccgcttccgcccccgaattgagaaaaatcgcttttttcgcatgatctcccggcgcaagggcgcaaagtttttcggccagctcaatataagacggatacatcatgacgttaaatcccgggtgaatcagatcctccgcctgtttcttcacggcctccaccactttcggatgggaatggccgacattcagcgttccgatcgctccggcaaaatcaatgaatcgtctgccgtccaaatcgtacaaaagcgccccttccccttttaccgccatgctgcggtttccgttgccgacccccttggaaacgaattgatcccgtttttgctgccactgggcagttgtcacttccgatgatgctgttcgactcatagattccatccccctgcattgttttcttatcattctgacttctttttggtatgatgaaaagtaccaaaaccaatttatccatggtatcagaaaggggcagggtctggatgctgacgatttccattgaccattcggaaacggcggattatatctatcagcagatctatcagcacataaaagcggccgttttaaagcgcagcctgatgcctcatacaaaggtgccgtctaaacgggagcttgccgagacgctgaaggtcagcgtaaattcagtgaattcagcttatcagcagctgctttcggaaggttatttatatgcggttgaaagaaaaggctttttcgtggaggaaattgaaacgtttgatcatgaagaaacgccttcgctctcattgcctgaagatttaaaagagcgggagacggataaaagcggctggatttcgttttctcatatgagcgtggatacggcgcattttcccctgaaaagctggttccgctgtgagcagaaagcagccgcccattcatttcatacgctcggtgaactcgtccatccgcaaggcttatatgaagtgagggcaacaatttcgcggcttatttctctgacaaggggcgttacatgccgcccggaacaaatcgtgctcggggcgggcacgcaaatgctagtgcagctgctgacggaactgatgccaaaagacgcgctgtacgccatggagaatccgggatatatgagaatgtaccggctgctgcaaaacctcgggaaaaaggttgcgacgatcagccttgatgaaaaaggcatgtccatggacgaaatcgaaaaacgccggccctctgtattgatcaccacgccttcccatcaattcccctcaggcgtgatcatgcccgcttcccggcggattcagcttttaaactgggccgccgaacagaacggccgcttcatcattgaagatgattatgacagtgaatttaaatatgacgccgatacgataccggcgcttcaaagccttgaccggtttcaaaatgtcatctacatggggaccttttcaaaatcccttttcccaggtctgcgcatcagctatatggttctgccgcccgggcttttgcggacgttcaaagagagaacgtatgacctgcatacgtgcagcacgcttgcccagctggcgctgaaagaatttatcgaatcaggtgaatatcagaaacatattaaaaagatgaagcagcattataagaacatgcgggaatgcctcatttcggctttggaagaaacattcggaggaagaatcagtgtaaagggcgccaatgcggggcttcattttgtcactgagtttgactgcgcctgttcagaaaaagagattttggcacgggcggatgcagaacagctcgatctgtttgcgatgagccggttccgtctgaaagcgggaggcgattcaaataagccgcagctcattctggggttcgcccgcctgaaggagagcgatattcaagaaggcgtcctcaggctttaccgggcggttttcggcgcataaaaaaacccccggaattcggggacttatttaccagcggtccggctctgtctgcaaaatcgcctccagcaggccgggaaacgccgcttgtaaatcatctttgcgcagggaataataacggtgcttcccgtctatacgtacttgggcgacccccgcttcccgcagcactttgaagtgatgggacagcgttgatttagcgacccggacatcagcgcaggttccgcacgttttttctgttgtttccgccaattgtttgaccagctctaagcggagcggatcactcagagcatgaagaacctttgtcagctgtaagcgttcggtttcaggatggtttggaatgttcatgagtcaaatgtaacacagatcatcggcgggtgacaatttaggcggtgagggtttttcctttaccattcgcagcgaaacatgttacagttagttcgatgatattcgaactataacaaataaacccaatcaggaggaataacaatgatcgtcttacaggcttacatgaaagtaaaagcggataaacgcgaggaatttttaggagaagcacaatcacttgttcagcattcacgcgcggaagaaggaaatgtgcaatacgatcttttcgaaaaagtcggtgaggaaaatacattcgttatgcttgagcaatggaaagatgaagaagcgatgaaattccacaacgcaactgaccatttccaaggattcgtggcaaaagcaaaagaagtgctgagtgcgccgcttgacgtcgtccgcacagaactgtcagagtaacgaaaggatgaatgacatgaacgaagtccttcaattattaacagaccaccgttccatccgcagctacacagatgaacctgtatcggatgaacagctggatcttatcatccaagccgctcaggcagcgccgacttccattaacggccagcaatttaccgttattgcggtgaaagataaggagcggaagaaaaaaatatccgaattggctggcggccagccgtggattgagcaagcgccggttttccttttattctgcgctgattttaaccgcgccaaaattgcgcttgaagagtataatgatacaccgcttgagatcacgaacggtttagagtccgtcttagtcggagccgtagatgtcgggattgcgctgggtacggcaacggctgcggctgaatcaatgggactcggcactgtgccgatcggcgccgtgcgcggcaagccggacgaactcattgaattgctgaaacttccgaaatacgttttcccggtttccggtctcgtcatcggccatccggcagaccgctccgcgaaaaaacctcgtctgccgcaagcagccgttctgcatcatgaaacgtatcaagaagaagatttaagaacacatatcgaggcctatgacaagcagatgtccgaatacatgaaaaaacgcaccgacggacaggaaacgagaaactggtcacaaggcatcacctcctactataagcagctttattatcctcacattcgtgaaatgcttgaaaaacaagggtttaagacggataaataagcggatcagcctgccggaacactccggcaggttttttctatttctcaaacaaaagcgttgacactgtgtaaaaatttttgttaatattttcatcatatactcattggttttctgtgaaccgatgggttttctattgtgacgaaagaaggaatctgggcttatgaatgataagaaaacggatattctgctggcggcaagaaagcttttttccaggaaaagcttttcgtcggtttcgatgcaggcgatcgcagaggagtgcaaagtctccaaagcatctttatataagctgtttgaatcaaaggaagacctgctgttggagctgctcgactttaaccagaaacagatggtagccgccgcttcattattgaatgaagaaacaagcctctcccctgaggaacggtttgccaaaaaactgatggctgagcttgaaggcttcaggcgcaatcagcagttttttaatatgctgatgtacggaagcccctcttccattaatgagcgggtaaaacggcatattcacagggcccgctccacctttatctgctggcatcgcgattcactgattcagacgtacggcgaagacattattccttatgtatgggagctggtgatcgtcctgcaggggctcctgagagaatgcatcacgctgattaagctggaaaaagaaccgctcgccctggagccgctcacggagtttatcatccgccatctcaatctcatcgtcgaaaacaggacaaccgaaaccgcattgcctcaggagatgattgacctttatatcgcctccgcttcctcatttgagccgaaagacaaaaccgtattgctggctgaaagcctgaaggaactgaaagaagcggtctcagcccttccggaggaaaaatatgacgccgcaggactcgcttccgcggcggctatgctggagaaagaatcagcggacaaacagccgcgggattttctcatcaaagcgctcatcggttatttggagcaggccggaccgctgcaccagccgcttgcagccgttaaaacattgctcaaactataaagaaagaaggaatcagcttgaataagagtattgaaactgcaccatacaaccgctctgtcattgtcgggattcttttggcgggagcgttcgtcgccattttgaaccagacactgctcatcacggcgctgccgcacattatgaatgacttcaatatagacgccaacaaagcgcaatggctgacaacatcgtttatgctgacgaacgggattttgattccgattaccgcgtttttaatagagaaattcacaagccgcaccctcttgatttccgccatgagtattttcacggcgggcaccattgtcggcgcattcgcaccgaactttccggtgctcttgacggcccggattatccaggcggccggtgccggaattatgctgccgctcatgcagacggtatttctcacgattttcccgatggaaaagcgcggccgcgccatgggtatggtcggcttggttatttcgttcgcgccggcgatcggcccgacgctttccggatgggcggtcgaagcattctcttggcggtctttgttttatatcatcttcccgatcgcagtcatcgatttgcttttagcgattattctgatgaaaaacgtcacgacattacgagaaacacagattgatattttatccgtggtcttatcgaccctcggattcggcggtctgctttacggcttctcaagcgccggttcatcagggtgggccagtgctgaagtgctgacttcgctgcttgtcggagcggtcgcgctgattttctttatcgcaagacagatgaagctcaaaaaaccgatgctggaattccgcgtgttttctttcgggattttcagcctgaccaccctgctcggaacgcttgttttcgcgctgctgatcggaacggaaaccattctcccgctttacacgcaaaaagtccggggcgtatccgcgtttgataccggattaatgcttttgccgggcgcgattgtgatggggatgatgtctccgtttatcggccgggtgtttgacaaaatcggcggaaagggccttgcgatgaccggattcttcatcatcctgctcacgtccctgccgtttatgaatctgacggactcgacgtctctcatttggattgtcgtcgtttataccgcgcggcttttgggaacagccatgattatgatgccggtgacgacagcgggtatcaacgccctgccgcgccacttaattccgcacggcacagccatgaacaataccgtccgccaagtcggcggttctatcggtacggcgctgctagtttccgtgatgagcagccaggccgcgcacgcaaatgcgacaactccggcaaacgccgccctgcacggcatgaatgcggcatttgtcgtagccgcctgcatcgcgctggccggcttcctcctatcttttatattgaagaaaaaaccgcgtcagcccgagcagcagcaggccgttacgcggtaaaccaaaaagaacccgatcacgtatgtgaccgggttctttttttacttctcgattccgtctttaacttctttcaccatttgcgccatggattccaggccgcctcctgataaataccatgtagctgaatcaaggtagacaacatggttgttcttcacggctttcaccgattttacataatcattttcaaccacttgttttgttgaagattttgtgccgatcgctgttccgcggtcaacgacaaacatgtaatcagggtttgttttggcgatatattcataggaaatgctttgtccgtgcaatgaggcttcgatgtttttgtcagccggtttgacgccgaacacatcatgaatgaagccgtatcttgatttagatccgaacgcgctgattttgccgtcgttcgccatcaccactaacccgtttttatccgtgctgcttgtctttttcttcagatccgcaatggatttgtcaattttcgcaagcttatctttcacttcattttctttgttaaagattttgccgatcacttcggtgttgtgcttgaatctgtcaacgtagtttgtatagtcatcatcaagataaatcgtcggcgcgatttttgagaactctttaaaagaatcagattgtctgtgggcgataatgattaaatccggatcaatatccgcgactttttcaaaatccggttcttttaaaccgcctgtattggcgtatttatcacttttatatgaagataagtattttggaaggttttgtttcggaagtcccgccacatgatcctgtaaaccgagttcatccatcgtgtccagcattccgaagttgaatacgacgacttttttcggattcttcggcactttgacgccttctttgttcaggtcatctttgattgtgattgtttcttttgatttgcctgatgttttgtccccgtttccgcatgcagaaacaacaaaaatcgtaacgagcgcgatgaatagcagcgcgaattttttcataattttcacctcatctggtttttaagaaaagtacacaccgatccgctgactgtcaatctcttgaatcgggatggtcatatcataaatatcttcaagcacggaggtttcaatgatctcctccgcaggcccttctttgacgatccggccgtttttcagtgcgacgatatggtctgaatatacggatgcgaagttgatatcgtgaatcactacgacgaccgtttttccgaagtcttccacaagccgcttcaacagcttcatcatttcaacggaatgcttcatatctaaattgttcagcggctcatcgagaaaaatatagtccgtatcctgagcgatgatcatcgcgataaacgccctctggcactggcccccgctgagctgatcgagatatttatcctttaagtcatccagcttcatataactgagtgcctggttgatatgcacccaatcttcatccgtcagtttcccctgggaatacggaaatctgccgaagctgaccaggtctttaatcgtcagcctgatattgatttggttcgtctgcttcaggatgctgattttttttgccagatcgttgcttttacaggccccgatctcttgcccgtcgaccgtgatttccccggaatccgtcttaatcagccggctcatgatagacagcagcgtgctttttcccgcgccgttcggaccgataaatgaggtgagcctgcccttttgaatggatagagacgttttctcaaggacggttttccctccgtattgtttgcttacatttttgacctctaccatgatttattctcctttaacagcagatagataaaataaatcccgccggcaaaattaatgatgacgctcagcgtcgtggaaaacgtgaacactttctccacgacgaactggcccccgacgagcgcgacgatgctgatcaggacagaacctgcgattaaatacgtgtgcctgtaggtttttaaaaactctctcgccagattgacgacaagcagtcctaaaaacataatcggtccgacaagagccgtagagacagacacaagaatggcgacgacaatgagcatctgtttcacaagcttatcgtaatcaatccccaggttgacggcgtgctccctgccgagcgacagcacgtcaaaaaaccgcgtgaaccgccagacataaatgcccgtcagaagaaagacagcaccggcaaaccataaaagatcggtgttgatattgttaaagctggcaaacattttgtcctgaacaacctggaactcattcggatcaatcagcatctgcataaaggatgacagactgttgaacagcgtgccgaacacgacgccgacaagcagaaggaaaaacacgttccgcccctcgcctttaaacatgagctgatacaaaacgagtgacaagagcaccatcagcccgacggagatgacgaaattaagatttttgttcatcatgacgatattcattgaaccgaacaggaacacgatgacggtctgaatgagcatatacagggaatcgaggcctaaaatgcccggtgtcagtatgcggttatttgtaatcgtctggaagatgaccgtcgaaaacgcgatcgctcctccggtgagcatcatggcaagcactttgaagcatcgtctcggcagggagtattcccaattgcccagtccgtagaacaggaagaatccgatacatatcatggcgagcgccgccagcagcgtaatttttttattatgactcatatgcttttctccttaacagcatatacaggaagatgccgctgccgataacaccgaccatcaggccgatggaaatttcgtacgggaagataatcactcttcccaaaatgtcgcaaaacagcacaaaaacagcgcccagcagagcggtgtgaggcaggctgctcctcaggttgtcccctttgtaaatcgacaccatattgggaatgatcaaaccgagaaacggcagcatcccgacggtcaggatcaccagtgaagcgatgagcgacacgataatcagaccgatattaacgacgcgtttgtatttcaggccgagattgacggaaaagctctctcccattcccgccaccgtaaatttatccgcatacacataagcgatgatcaccagcgggatactcagatataaaagctcataccggcctttgacgaccagtgagaaatctccctgcagccatgatgacaggttttggatcagatcgtatttatatgcgataaacgtggcgattgagctgacaatattcccaagcattaaaccgacgagaggaataaaaatcgcatcattgaacttgattctctcgaggattttcatgaaaaggaaattccccgccaacgcgaaaacgaaagcgatagacattttcacaagcggactcgctgacgtaaaaagcattaatgaaatcaaaattccgagccttgcccagtccatcgttcccgcagtcgtcggcgatacaaatttattccggctgatctgctgcatgattaatccgcagatgctcaggctcatgccggcgatgataatgctcaccaaacgcggcagccggctgtcaaacaatgtacctgcctgttctttatttaaatgaaaaatatccagcggcgacaaatcttctacaccgataaatatagaagtacacgccaaaaccgccagtagcaaaagtaagtaacgtagcttcatgctgcctccctgcacccatcacaaacggtatgactgattgccaaacaactcccatatatcccactcgtaatgattatcattatcaacgacaattataatcttatcatctttccaagcgcagtcaatacagttttgctttcaaaagcggtcatccgcgggccgtacactaaattgtcttacaatcagtctatcaagaatttgcaggattttctataacctacatttggctgcttatcattttttgcacatgatgacacgcttgagggaaacaaatctgacaaacagcggcaaaattcctccatgaaaatacaaatgttctccccacgtagaaaaaatccttgatttacatgtttgaaagagagataataaaaattaaatttgtgagaaaatttaaatattaggggatgtaaatcatgaaagttgtaaaattcggaggcagctctcttgcgtcaggagcccagcttgagaaagtgtttcaaatcgtgacggctgatcccgcgcggaaagccgtcgtcgtatcggcaccgggaaaacgcttctcggacgatacaaaggtgacggatctgttaatccgctgtgcggagcattatttgcaaaaaggtgcagcgcccgagcttgccgaaacggtcattgaacggtacgccgccatcgcgcgtgagctgaacctggatttctctattatagaaagaatccgcagtgacctattcgctcttttaaacagctgtaaaaccaatcccgaacaatatatggatgcggtgaaggcgagcggcgaggacaacaacgcgaagctgatcgcagcctacttccgacggcagggcgtgaaagcggaatacgtaagtccgaaagaagcggggctgtttgtgacgaatgaacccggaagcgcgcaggtgctccccgagtcttatggtcatttgtaccgtctgagaaaccgtgaaggcttgatcatttttccgggatttttcggttacacgaaggagcatgagattgtgacgttttcccggagcggttctgatattaccggctccattctcgccagcggcttaaaagccgacctgtacgaaaactttactgatgtggacgccgtctattccgtcaacccgtcaatcgtgcggcatccgaaagaaattaacgaactgacgtatcgggaaatgcgtgagctctcctatgccggattttccgtttttcatgatgaagcgctgattcccgcatttcgggccggcatccccgttcagattaagaatacgaataatccggatgcgaaaggaacacgcgtcgtcagcagccgtgacaatacgaacgggccagtcatcggcatcgcaagcgacacgggcttttgcagcatttacataagcaaatatttaatgaaccgggaaatcggtttcggccgcaaagcccttcacattttggaggaagaaggattgacgtatgaacacgttccatccggcattgacgacatcacgatcatccttcggcacaatcagatggactcagaactggaacacaggctcgtcacccgtctgaagcaggaacttcaagcagatgaagtcacagtcaggcacaatctggcgctgattatggtcgtcggggaagcgatgcgccataatgtcggcacaaccgccagggcatccaaagcactgtcggaagccggcgtcaacatcgagatgattaatcaagggtcatcggaagtcagcatgatgttcggagtgaaagaagaacaggaaaaacacgcggtgcgggcactgtatgatgaatttttcgccggagtcttactctcataggacaccgcctcttttttctcttgtccactaatatcccttacaaagcagcttcttttacatattgtatggtatagacaatatggaggtgaagctcatgtcaggatattctggagtcagctctttcgctttgatcgttgttttatttatcctgttgattattgtaggtactgccttcgttggcggtttctaaacatcactccgtctatatgaggacgctgcgggttttgacctgcggcgttttcttttgttttccgccgctgtccaagtccggccgcgcaaaaaagactgccgagaacattctcgggcagtcttttcctttgttctggttattttctcctcacgtcattcctctttcagctacatggaattcagcctgatctgtctggcctgcacctgtcactgtaaaaatcgcggcggctgctaaacaaataacaaaccatttagatttcaatttcatacaaaccctcactcctttgtatttgtttccttgcctcttcgactttcagaaaatagtcagaagaaattttaaagcaattttgttcatagtaatatttagctgcttctagtgctaaatcctctatatcggcgtataaatttttatcttccaggtaacggaaacacgcgctgattgtttcctcatccggtttcgcctgatacagagcctgcagccattcgaattttaccgtataaacgggatcgtctgtttctttagcatattcatatccccgcttgtgatattccgacgctttttctttttttccgagtttaaagtaaatgagtgtgattagaaaatatgcttgaggaagagaattgacgattctttgtgattcaaatgtatcgaccgcccgttcaaagtacggaatcgcttcgccgatgcggtcctgattgtagtagcacagtccgaggttatacagcgccctcccgacaagctgcgctttttgttctttttcggccatttgcagagcgtgctgaaaatgtttggccgcctgttcaaagcgcctttcatccattaaattgacgccgaatacaaaatggcattgaatgatccggacgttatatgtgtcctgctctacgtaaatttcataagcgttttttatatgtatcaaagaaaaatacgtttgtttcatatgataataagcttcggccactttaaaataaaactccgcccgttccacgtggtccgatacgaaggccagttttttctcagcttgtttataatatgtaatcgctgagataaattctcttttatcaaattcaaacatgcctttgaaaaagttgacgtaataatcgagaagccctttgaggccggcctggctgttatcaatgttatcaagaatttccgacagggtcggctggtcttctatcttcagtttttccagcggctccaagtagtccagcatcagctgatggcgaaattccatgagggaataataaagcactaagttcgaatcaggctccatatggtcaagctcttgtttgatctcggccttcaagatctccgcatccggcacgctgaatgttctgatgtatcgataccactcgttaattttctgcccgactgctgaagaaggaattaacccgctcttcattccttcaccctccccatccaagacctgtttaccagttattttatcacgtttccgtctctttccatcccgaaaaacacgcaaactttgtttcggcagagcgcaattttccgagtggagttaaaacaggcggcggccagacgggaccgccggtttcaagatgattcatttttcgtattcagcggaaggcggattgtaaaggtcgtgccttttcctttttcgctgtcaatatctatcgtgcccttgtgcatttcgacgagctgcctgacgatggacaggccgagtccgtattcgccgtatgccgtattcgtccgggacacgtccgccttataaaaccgctcccatatatgctcaatttcttctttggagatgccgatcccggtgtcttcgatttcaatcaccgtttctttatagccttcatacccgcgcagcgtgatgtctcccttttgcgtaaattgaatgctgtttttcgtgatgttgacgagaatctggatcagcctgtcataatcggcgaatactttgacgccgtcctccacttgaatccgcagctgattttgcttttcctccgcctgctgattgagatgctctttaataatttcaaacacctcgatgagcggcagactgagcttgtccagtttgatttgctgggatctgattttttcataatccaggttttctttcacgagcctgagcatccgcttcgtttcttcgctgatcagcgagaagcatttctctttatctttttccgggatggtgttgctgttaagcccctccacaagtccgttaatggtcgtcaaaggcgttctcagctcatgggagacatcggcgataaattggcgcctccgtttttcaaggcggtcaatctgctctctcgattgcttcagatttttggccatgatgttgaaatcggacgccagcatgccgatttcatcgccgccgctgtttttaagagaaatatcataatcaccggatgccacttttccggtcgcatcccgcaatgtctgaatccgcttgacgtgaaatttagataaaagccagctcagcagaatcgtgatgataagggtgctgatgatcgcgtaaaacatatagcggttgacctggctgatcatctgctcgacccctctgacgggagacacgagcagcaccgcgcctttaaattgatcgttgataaaaagcggctttgcgacaagcgatacttctaaaccttctgtattaaaacggttcatctccgctctgatctgaacggttttcccttgcttcagcatgtgccactctttacttttcagcttctcgcgcggcggcatatcgtcaggaaaaaagtaaggccgctgatgttcatcgaaaataataaacctggtctcgcgcgtttttaacatgtcctgatacggatacaggcggcgcagatcaagatcgcggccgttcagctcacttgtgatctgctgggcgtaagatgacagctcatccactttattttgatacgcaaaatctttcacaaagtgcgaaaacagggaaatgatgatgaaaaaggccaaaatcaaaatgctgacatgacttaacagcagctgatataagtatttaatcctcatcaaatttgtatcctaccccccacaccgtgtataaaaacggtttttcctcactggacagttttttgcgcagccgtttaatatgaacatcaaccgtacgttcatcgccgtaaaattgatagccccacacctgctcaagcagctgctctctcgaaaaaacctggcgcgggttttgtgcgagataaaagagcagatcgaattccttcggcgtcagattctcgacaggttttccgtgcagaaacacttcccgcgtcttcttattgattgaaaaacacgccgtttcgatcaagtcgtcgcttttaacggcctgccccgtcgcccggtatcttctgatcaccgctttaatccgcgctactagcgtcagcgggctgaacggcttggtgacatagtcgtccgcccccatttcaaacccgatcacctgatcagactccgtgtcctttgcggtcagcataataatcggcacactgctcgtctctcttattttccggcagatcgtcactccgtccatggatggaagcataatgtccagaatgaccaaatcccagtcctctttcgtgaaacgctgatagccttccactccgtcatggacaaattcggcttcaaatccttctttaaaaaagaacatttccgtcatggtgcatacgcttatattgtcttctatcattaatatcttcattggttcctccgcttatcttcacgctttttcttataatagcaccattttacccgggtgttttcgggtttcacaattgttagtttttatttcatcacccggaaatagtttgttcatatttttttcatacatttctcctactatatacatatcggatggccggtgctaaagaaggccggttttacaagatctgacacccacacggaggaacagacatgaactttataaaaagagccttttggagcatgaaggcaaaaaagggaaaaacatttttgcagctggttgtgttttcagtgatttgcatttttgtcctgtccggtcttacgatccagtcagcggcaaagaaatcaagcgaactggcaaggcagcagctcggcgggagcgtcacactccaggctgaccgccaaaagcaaatggcgcagcagcaaaaagacggtgaaaagaggacgtttgaatcaacgccgatttccgtctcagatgccaagaagcttacatctttacagcatgttaaaaattacaacttcctcacgacagcgtcagcaaatgcagaaagctttgatgcgataaaaagctcaggcgaatcagccgataacagttccggcgccggccgttttcaaggcggcggaagacagatgatttcagctgatatctcgatcgaaggcgtgctctctacggcattgcttgatgatttcacaggcgggagctcaaaaatcactgacggccgcgccatcacaaaaacagatgcggacgcaaaagtcgccgtgattaatgaaacgctggcagatcaaaacaagctgaaggtcggcggctccattaccgtttcctcagcagcggatgattctgtgaaaacgaagcttaaaattgtgggaatctataaaacaacatcatcaggagacgatcaggcacagcattttttattcttaaatcctgacaataaaatctatacgccttacaccgccgcggcggcgttaaaagggtctgataacaaaaacaaaatcagctcagccgtttattatatggatgatgccaaatatattgactcattcgttgcggctgcgaaaaaaacatctatagatgataaaacctacgcgctgacgacaaatgatcaggtgtatcagcaaatggtcggcccgattgaaaatgtcgcgtcattttctaaaaacgtggtataccttgtatccatcgcgggcgcggtcattctcgggttgatcgtgatgatgtcgatcagggaacgcaagtatgaaatgggtgtcttgatggcgatcggcgaaaagcgctggaagctcatcggacaattcttaacggaaattctggttgtcgccgttattgccatcgggatcgcatccgtcacgggcagccttgtggcgaatcagctcggaaatcagcttctttcccagcaggtcagctcagccgatgattcacagcagcaaacaagcggctggggcggcatgttcggtcagcattcatccggcgcggatgtcatcagtacaatgcaggtaaacgtctcgctgaatgaccttctgattcttggcgggatcggcgtcgcaattgccgtcatcgccacattactgccgtctgtatcagtcatgcggcttcaccctaaaacgatcctgaccaagcaggaataagaggaggcagcataatgagcctattaacctttcaacagaccggctactggtaccaagacaaatcacagccgctgttccaggatataacgatcagctttgaaaaagggaagttttatacaattgtcggcgcctccggaacggggaaaacaacgtttctgtctctggcgggcggccttgacacacctaaacagggaagcatcctttataacggaaaagacatctccaaaattggattaaccaaattcagaaatcaatatgtctctatcgtctttcaatcttatcatctgatcccgtatatgacagcgctccagaatgtcacaacggcgatggagatcaccggctctaaggagaacaacaaagatgcgttcgcgctcagcatgctgaaaaaagtcggcatcaccgaacagcaggcccgtcagcgggtgctgacattaagcggcggacagcagcagcgcgtttcaattgcgcgggctttctgctgtgacacggatttgatttgcgcggacgagccgacgggaaatctcgacgaggatacgtcaaaggaaatcgtccggctctttcaggatctgacgcataaagacggcaaatgcatcatcatggttacgcacgacgaacaaattgccaaagtttcggatatcaacatccgcttatcaagaggaagtttcacggtcaaagaaaacggcacggccgtttcctgataccgcgcccctgccagcgcagacaggggcgcaccctatatccccctattcaatagaagtgaacgtaaaaagagcgagggctgcatccccccgctctttttatttatatcagctgtaaataacggtccatatttgattgtccggctgctttgatcaattcttccgcctttttctcttctcccggcaaagcgagccggagtttgtcttcaatgtctttttcagaaagaccgtttcccggcgctcccttcggacagtcgatacgtgtttcatagacatgaccgccggaagccgtgacccgtacaattgtaaaacggcccttcggaacggcgttgtcagccggctgaatttggtcatcgcaactgcggtgaatccgctcaaatcctttttgaagggattccggaatcggctcggatgtgaaatgttcaactgaaaaatccttaccgtgcaaagccaaggtgatcacatattccacgctgaatcttcccgcttcgcctgttttcggacgccgttctgtcaatgcagcgtcaccgcccggcggataaatcacgtcgatccgttccgtttggccgaaagtgagaccatgttcggccttcagcttgagaatggcgtccgccgcatgatgagccgccgaacaaaacggataaaccttaaaccaaagtcccgggctcacaatccgccaaggttttccccacccgcttacaaggagggtttctgcccgttcaagatcgccgtacagtccgaaaaaacctttctccccgtcgagcgcatgaactgagccgccgaaaccggcctttgcaagctttacggcgaacaacccggcttgagcggccagtccggcgtggagcggcttcatttctgtcccgaattgcactctcatgcctccggagcgggcagccgcaaacccgattgctttctgcaattggttttgattcagattctccgcgaatccgacggcgcatgcggccgcaatggcacctaacgttcctgtattatgccagcctttctcgtaatgatgccttccagctgactcgccgagccgcgccatcacttcgattcccgtcacataagcaccgagaaaacggcttttgtctatacggccggctgatgcggctgcaatcaaagccggaaggatgactgcgctcggatgtcctcttacatcagaatgaacatcatcaaaatcaagcgcatgtgcgatgaatccgttaatgagcgcggattgggacggcgtggttttttgatttctgccgataagcggcgctatcggcaccccgccttcttcttcggccagttttaccagcttttcaactcctttatcccgtctccccgcaaaagctgccgctgtaaaatcaagcagtcctttgcgcgcttctttcatcgcttcagcggatgtttccggcacagacgacatgacggcctgagcaagtccggccgtcagattttccgtattcattccgtctgctccaatacgttgacggcaagccgggcgaaaaactcagccgctgccgggagcgctttttcgtcgagtgtgaaggcgggatggtgccattcttccgttccgtttgttcccatccagacgaagaagccggggattttttcttgatataatgcgaagtcttccccgccgggcgactgttctgcccgaacggtttgaagcccgaggctttcagccgtttgttccgccgcctgtatgaaacgggcgtcgttcatcactgacggaaggtaaggataccagcggaaatcagcctctgccccgaatccggctgcgattccttcggcaacccgcttcatatgtttcggaacagcgtcacgcgcttctttttgaaacgtccggacggtgccttccatttcaacatggtccgggatgacattccaagagctgccgccttgaactcttgtgatgctgacgacggcattataaagcgagctgatatttctgctgacaactgattgcaggccgccgatgatctgtcctgccgcctgaatcggatcaatgctgttatcagggattccggcgtggccgccttttcctttaacagtgatttcaaagcggtcgacactcgccatcagcgggccttctttcagaccgaccgtgccgacggggaggtcaggtttgttatgcatgccgaatatcgccgatacaccgtcaagcgcgccggcttcaatgacctgtcttgctccggcggcgatttcttccgcgggctgaaaaataaaccgcaccgttcctttcagctcatgctttctctcatttaataaaaaagccgtgccgaggatagatgccgtatggaaatcatggccgcaggcgtgcatcacgccgctgttgcgcgaagcaaacggaaggtttgttttctcttcgatcggcaatgcgtcgatgtccgctctgacggcgatgacggggccgcttttgtctcctttgatttcagcgatcactccggtttgaagtttcggcacatcaagaaccgtgattccttcttcctccagccagcggcggattttattcgtcgtttcgtattcctcgcctgacagctcagggtgttcatgaaggtcgcggcggatattgattaaacgtttgtttaatgattcatacgtttcatttgccatttcttcttcttcccttcttagacaagttcggcgggctctcccacttgcttaatgaattttttcgtccgttcgttctgcggattgtcaaacagctcttccggcgttccctgttcgatgatgcgtccgtctgccataaaaataactttgtcggccacttcacgagcaaaagccatctcatgcgtgacgatgatcatggttgtctgtttttcggcaattgatttgatgacttggagcaccccggctacaagctcagggtcaagggccgaagtcggttcatccagtaaaatcgcgtgaggatcaacggccaaggcgcgcgcaatcccgatccgctgctgctgtccgcctgacatcgtaatcgggtagctgtccgctttgtgttctaaaccgacttgccgcaacagatccataccgatctgttccgcttcttttttcggtttcttttgcgcggtgatcagcgcctctgtcacattttgcagggcggttttgtttttgaacaggttgtaattctgaaacaccatcgccgtctgctggcgaagcttatgaacgtctttgcgcgaataggacgctgcattcagctttgcatcaccgatttcaatgatgccgtcatccgggcgctccagcagattcaaacaacggaggagcgttgattttcccgagcctgacgggccgatgatggccgtgacttcgccgcttttgatctcaaggtcgatcccgtcaagtacggtaaggtctttaaatgcttttcgaatatgtctgacttgtatcatcctgagcctcctcctatgtgcgataaggcttgctgatcgcccgttcgagcagatcctgcagcacactgtaaataatcgtaagaatccagtacatgaccgcgacggctaaatacgtctcaaaatatttgaggttgcctgatgcgtacatttttccttgggcgaacatttccatcactcctaatgtaaaggcgagcgatgtttcttttaacaggccgataaacgtatttcccgtcgcgggaagcgcgtttctgacggcttgcgggaaaatgattcgtctgtacgcctgggattttgtcattccgacagacagacaggcttcaagctgcccctcatcgactgaattgagcgccgcgcggaagatttcagccaagtaggcggcattcttcaggcttaacccgataatcgccgcagttaacgccgtcatcttgctcattccgggaaacagctgaggcaggccgtaataaattaagaaaagctggacgagcgtcggcacgccccggaaaaatgaaatatacacctttgacagctggtgaagcacaggaacacgattttttgtgataagcgctaatataaggccgccgatcacggcaaataccatggccgcgacggccattagtaatgtgatcggcaaggcttcgattaacgcgggaaaagctgaaaacataaatccccaatcaatgctgttcattctcgattttcaccgccgtttcttaatgctttgcttctgttgtgatatcttctttaaagtacttttcagacagctttttcagcgtgccgtcttttcgcaggtcttcaatggctttgtttacttttttgcggattttatcgtgagccgcatctttcgcaaacgggaaagcgactttttcatagacaatcgggtctcctgctaatttcagaggcagaccggtctttttgatctgggcgatcaggacgctgcggctgtttacataagcgtcaacccgtccgtaagccacgtctttcagcgtgccttcttgtgtttcatacgttttcatattgatttttttatccgggtccttgctctcaaggtttttcgcgtggtttgagcccagaacggccgccactgtttttccttttagatcgttgactgatttgatgtctttgttatcgtttttgacgacgatttgagtgcccgcatacgaatacggttctgtgaagttatacgttttcttgcgttcgtccgtgacagcgacctggttagagatggtgtcgagtttgccggtctggagctctcccatcagaccgctgaattcaagcagcttccagtccagcttcatgttgatttttttcgcgacggcttccatgacatccacgtcaaagccggtcagcttgccgttttctttatatgcgaacggatagctttgtcccgtggcgccgacatgcagtacgttatcgccgccttcgctttcttttccgtttccgcatgctgataagaccgccaaaagcgcggcagacagcagcaaagcccatgttttcttcttcattaaaatcccgccttttcctattaatatgttaatcctgcaattgtttttttaaataaatggtgatgtgcccttttcctagatccttttcgcctgcacggacgtagccttttcgctcgtacatgccgatcagccacggatgcttgtccgctgtgcccagtgacacgaaaggcgcttttaatgtgtcgcggagcactgtattctccagccactccagcatgtctgagcccgtccctttttttccggtttcaggatcgacggcaaaccaccaaatatgtggaacaccgtacggcccgggattcggcccccacggcatccgcagagaaatcgtcgccagaatccggccgtcttcctccaaaacgtaacaggcgtttttttgtatgttattcaaaacgagttctttatccgccgtggcagcggcaaagttgatgccgagcttgcggatcggttcatacgcccgcagtgtcagtgaaagcagctcatcagcgtctgcctccgttgcgagccggtattgtcttgacatgatgagccctccttcagtcggcatatcggtttgccggtttttccagtccgaaatgttctctgagcgtcgttccttcatactcttttctgaacacgccccgttcttgtaaaatcggaatcactttgtctacaaaaagagtgagaccttcaggcaaaagcggcggcatgatgttgaaaccgtcacaagcttgttttccgacccattcttccatcttatcggcaagctgttctggcgttccgacaaagatatgatggcctcttgaacccgccacatatttgtacagctcgcggatggtcatgttatcgcgtttggccatctcctgaacgagcttgaagcggcttttaacggcattcgacgcatccgcatccaattcaggcagcgggccgtcaagcgggcaggcggaaaggtcgacgccgcccagatagttttgcagaatgttcagtccgacagacggaatgatgaggtcttggagctcttcatattttgcctgcgcttcttcttcggtatcggcgataacgggaaaaattcccggcatgatcgcgattttttcaggatcacggccgaaagaagccgcttgttctttaatagattgatagaattcctgcgcggactccaaatgattttgcgcggtaaaaatgacctccgccgttttggcggccagcgcttttccgtctcctgatgatccggcctgaataatgaccgggcgcccttgaggtgtgcgggcgacatttaacggccctctcacggagaaatatgttcctttatggttcaattcatgcattttgcctttatcgaaaaatgctcctgattctttgtcacggataaaggcgtcttcctcccacgaatcccataatcctttgacgacttcaacgaattcttccgcgcgctgatatctgagatggtgctcaagatgcttttcgccgctgaaattaagcgcggtcgattcaatcgaagatgtgacgacattccagcccgcgcggccgttggaaagatggtcaagcgatgcaaattgtctcgcgatatggaacggttcgctgtatgtggtagacgcggtcgccgtcagaccgatgcgggatgtgacctgagcgagcgccgacagcagcgtaaacggctcaaagcgcgtcagcacattcgggtgtgatttgccgtctattgataaactgtccgccaaaaacagcatgtccaatttcccccgctcagccgttttcgccagttctttgaaataatccaaattcatgctcgcgtccgccggtgcctgaggatgtctccaagaagcgacatgatggccggtacccgcgagaaacacaccgagtttgatttcttttttctttgtcatgatggatctccttctattctgaaatacggttcggaacatattaacatgattaaacctatatttcctagtaattttataagaataaatcaaaatgtacaattgtcacgcaagtttgtcaatgcattaagacaaaaatcatgattttttaaaaaacccggcgcatcggccgggttatttcttcgaaactgtatagacggtccctttgacttttttcttaataacggcaatgataagcagcaaaacggggaacagcacttgaaacggaagatgaatataggtcggcacaacttttaagccttcattcatgtgttccgaaaaattgcttgcgatgctgatggagagaatcagcacccccaatccgaccgggaaggccagctgggacggatttttttctttaaaaagcgtggacacgcccacgacaaccgcatatgtaaaaaggctgactttgaaaaaaccgccgatgacgagcacgagcatgaaaaagacatccagccggtctaaaaactcttccactttaattgtctgtatggtgctcagcagcggaaattgagagcggagcattaagttgacgtccagcacacaaatattaatcgccactgacatcgccaaaaacaggccgctgatgataatcgccagaaatccggttttccgcacctttttccgatcctttaagtaaggaaaaatcatgacaaacacgattaattcaccgaacgggatgaacatcgtctgtttaaacacggaataaatgaccgttcctgcaccctccgctaaaacgggctggagaaatctgaggtttatcgtgcctgagctgataatgaggatcagcccgacggctgtcaggaaatacataatgccaaacagcagctcgccggctctcgctatcacttcaattccctttctgaccgcaaatatcgcggcgatcatcagcatggcattcacaattaaaagcggcgtatcctggtaggcgaaggtgacaagcatttcgccaaaatcccgcaatacgcgggcggcgatataagcaaaatagagaatataaagaagggaggccgcccagctcagatgtctgccgatcagttcgttcatgtaatctctcggagaagactcaggaaaaaattgatacagcgcctgataaacgtagaaaagtccgagaccggtaacgcacccgagaagcacggacagccacgcatcccgcccggccatcgtgcccggcgggatcaataacgaactgcccaattcaaacaaaatgatcataataaacagctgacgcgtgccgattttcgcattttccatacgcttcgctcctttctcctcaaatcaatcatgctcaagcttgtctgagagaggattattccgcaagcccgttcttctgataatgacttccgttttgacatctacggggagatttgggaaatattcttcatcccacttccctttgaactttttccatttgtccggatgcttccgatagatcaggtctccgaagccgacgaagtcattcttatgggcttttatatcttcaatcgatttggtgatatctttctcaagctgcacgctgagcgccttttgcatcgttatcagcacttgcggatcagacagatggaaagggtacctgacagcgtccaccagcccctcgacctgagcatgcacgtgaatatgcggttttccgttcggaaaagtggccgtcacctttgtattctggcgggtgacctgcagactgattgcatgcttcacgttcttccaatccgcattgatgaacgtatgcttgatcctattgagcagccatacagcccccacactgtcgtcatccttaatccagtaatccagcctcccatcctttttgaacaccgccagtccgtccgctgacagcactgctttcggttcagttgtctgcgtattttccatcgtagggccggctttatcgtctccgtgcatttcataacccggaataaacggcgacccggccggagaagcgagatcaatcagaacgtcctgaaggctggttttaatgactctgccgtattgttcctgcgtgaagctgagcgtcttgttcactttattggaagggattttatcaatcggcgtcagcactttaataatgtcttcagccttgcaattatgcgcgatcacaacagttgcggtcgtcctgaattcggtgtcgcggtcaagattgtccagaataaaactgagcccttcctctttcgccagtttttcactgaacaccacgagattcgtatgcgcaaaatagagccttctggacactttcatcgagccttttctcaaagcttccgtcatattgtctccggacaccgaatagacggaaaccggaggccggtctcccgctccgccgccctgcagaccgccggccacgtttcccggattgataatttgcaagtgaaggacgtattttcccgtttcggtccggtcaataccgatggcggagatcaccgctaaatcggtcagctcccttttatcccagcatccggatacaaacataagggaaaccatcgtacaaaggataagcatccatttacgtcttttcattaccgtcgccctcttctacatctttattaaccattcctctggatgtctccggtttcggtctttgatgttccccttggcgcctgttgttttcctgcacgagcagtcccggccttttttcatccgcccataacggggcgcggagaagggaatccttcagcccgcccggggttaaaggagcgagcggggacatatacggaaatccgaatgaacgcaggccgcacagatggacaaacatcatgataatgcccagaatcagcccgtaaaatcccatgaccgccgccgacagaataaagagaaaccggatcagccgcgcagatatcgccatgtcaaaagccggggtcgcaaagctggcaatcgccgtcagggcgacgacgataaccatggctggggaaacaatgccggcctgtacggcggcctggccgatgacaagcgctccgactatggaaacggcggagccgacaactctcggaagccggacacccgcctccctgagaatctcaaaggccacttccatcgtcagcgcttcaatcacggccgggaacggcaccgtctcccgctgggccgcgatgacaatcagcagctgcgtcggaatcatttcctggtgaaaggtcgtcgccgccacataaatccccggcgccaccagtgaaatgaagaaaatcaaaacccgcagcaccctgatgctggtggcgatatcaaatcgtgaataataatcctcaacggattgaaaaaattgaataaataaggccggcgcgatgagaacgaacggcgttccgtccacgataatcgcaaatcgtccttccagcagattccccgccacaacgtccggccgctccgtatgatatacggtgggaaacacagaaaacggcgcgtcttcaatgagctgttcaatgtagccggattccagaatgctgtcgatgtcaatgtgcttcagccgcttgcggacttccttaatcagctttttatcgcaaattccgttaatatacatcagcgcgacatccgtattcgtttcgtgtccgatctccattttttcaacccatacatcaggcgtttttacatacctgcggatcatggaaatattggtttgcagagattcggtgaatccctgccgcgggccgcggaaagagacctgggtgctcggctcttgaatggaccgatgctctcccccttccgtgctggcaatcagcgccttgtcagccccgtcgacaaaaatgagcgtgctgcccgccaccagcccggcataaagacttttccatttttcttcctctttcaccccgccgatcgcaagcgttttatcgtatatcaggcagaccgcttgttccggctgaacggacgggatgtcgattaaatcctccagaagggattggctgacgagctgttcgtctaccaaaccggcgatatacacaattgcggccggaagctcttcttttccgattttcagccggcggatgacgacatcggcactgttgccgaacctctcagacagcttcttcatattttgctttaagctgagggagatcggctcatcctgctctttgtccggctggctgtccgcttcttttctgccttcattgtcacggtcgttttgatcggcttttttttgtttcttctgcttaaaaaatggcggcatatcgcaaaaaacctttcctcgtttttttcatattcttcctgtacggcaaaagattatgcacggcggaaagtctgtataagttctgcgtaatcgaaaaggataaaaagggagagtgatgcgcatgaaaatattgggggtttcattttttttgctggctgcctgtctgatcatttcagtaacgatagatatgctgcaaggtttcagtttctatggagcggtccaaaacaacctgtccgcttttaaattgaccaccttctcagaatggctgatgctgtttttattcgccctctttttaatcagagaaatgatcgttttatataaatcaggtaaaaaagatgcctgacaggcgcacggctgtattgtgtcaaaaaagaacacatccctccttctttcggagttcatgtgttctttttatttttccgatgcagattgttttcagatgacgatatttccgctgtccgtatctgtcgtgtgtttcacaatgacgcctttgataatgcggttgccgatgattttagtacttgcggaggaattggtttggatggcggaagcagaagcggcggaaaggttgttgatggtattgcccgacacgagggaatttgaggctccgttcagatagatgccgatcgggctgcccgccgttcggttgatcgtgagcgtattgtctatgacttcatgcgtgcctgaattcagatacacggtaacgataagcggtgatgattcaaagcggttgctgatgacagaggttcccgaggatgttgaactgaaaatgggatagtttttgtagcttttgaagagatttcccttgatgacagccctggcgtcatttgtcacagatacggcataggactccgcggcgccctgatacgcattcggaatcagcgtatttccttcaataacggcatttccgcctgtgacccatatgccccggctgaacgatttcagcacattttgttttacggtgatattgccggccgacatgctgattccgtccgttacctgattcagagtattattcataaagacggcgttttccgacagcgtcgcccgcatccccgtgcttcgtctcgtttcggaacgtccgttttcaatgacattgccgtcaatggtcacatcttccgcctgatagacggaaatgcccgtattttcaaattgactgattttgttatgggtgacgaggacgctttttccccttacatctattccggtggaaaaaccggtaatcagattgttggaaatgacggcattgctgctgtcctgtccttgtgacacaccttgtccggcgactgcggtccttgagccgccgtctgaccgaaagaagatattccccgaaatgacggtatgtgccccatacccgtagctgattgtgttatcggaatgatttccttcaattaacacattatatccgttaaagttggtgactgagcttgcggcgtttccggaaaagaagttgttgcggaccgtaatatgaagagcttcttcataatcaatatcgccttctccgtacgattcaatatcgattccgaatttcggagccgttccgttcccttgcccggcgtcttcaatcacgcattcttctaccgtaacggtattgcagccggtgattgaaatgttgtttcgccttgactgcctgatctcacagcggcggatggtcacctgttctgaagtttcgtaatcactgtttgtttttaacccgagcgggctgacaataatgccgtctcccgtaaaatccgaaatcttcacattttcgatcagcacattgctgctgccttcaatacagattccaaacccccattcatgggtcgaacgcaaagggacattggtatacgtgtgttcatcccgttcgccgatgatccggccgccggtgatggtgacattttcccgcctgcctatatagaaagccgagtagccccaggagctgttcggcgccactttaatcgtgcattccggatctaaaacgatggtgagatggctcggcacgttaatcccggcgttccgaaacggctggctgctgtccccgccaagcgtgccgttgattttataggttcccggcggaaaaaacaccgtatgacagccttcgctgacggccttggccaagcattggttgatggcgcccgtcacatcggtttttccgtctgccgccacaccgcaatccgtaatatccaatatacgattcggcaagtgataatctcctccttcctctcttattgtcatcttattccgccatatcccgctccgcctgtacatactttaaattttattaaaaaagtttataaagatagtttagttagataatataacaaaataagtcattggaattagggaaattcgtctatattcaacgttttaatatcttttcattctggaattttttgaattcagtataaattatattgacacaagtattatataagaatatgatttttgtaatacacttttttaagaaagggttggctcaggtggcatctattgataaggactctataacagaaactgtgccgcaacgaggctttttcggtcatccccgcggcttgtttacactgtttttcaccgaattttgggagcgtttctcctactatggtatgagagccatattgctttactatttatacacggaagtcgctcatggcggtctcggctttgataaaacgaccgcagttgccatcatgtccatatacggatctctcgtatacatgtcgagcgtcatcggcggatggctggccgaccgggtattcggcacggcaaacaccgtattttacggcggaattttaattatgttcgggcacatcgctcttgccttccctggcagcacggcagcgttttttaccagcatggctctgatcattatcggaaccggcctgcttaaaccaaacgtatccagcgttgtcggagatttatatacgaaggaagacgagcgccgcgactcaggtttcagcatcttttacatggggatcaacctcggcggattgcttgcgccgctaattgtcggaacactcggacagaagtacaactaccacttaggcttcggatgcgccgcggccggtatgttcctcggactgattgttttcgctcttacgagaaagaaatacctcggcaaagcaggctccaatgtaccgaatccgatttctaaatcatcagtgatcggcacgggaatcggagtggtcatcgcagcagccgttattatcgttctgattcaaaccggctggctgacgatccagcgtgtgattgacaccgtcagtatcctcggcattgtcattccggttatttactttatcgtgatgttcacgagcaaaaaagcgacgaaaacggaaaaatcacggcttgcggcttatgttccgctgtttattgcagcggcaatgttctgggcgattcaggagcagggcgcgacgattcttgctttatatgcggatcagcgcacgagactttcctttgcaggcatgcatcttgagtcttcatggttccagtctctgaacccattattcatcgttattttcgcgccggtgttcgcctggatctggatgaagctcggcaaacgccagccttcaacaccgattaaattcgcgatcggcattatccttgccggattatcatttttagtcatggtgcttccggttatgggcggaagcggcgagcttgtgagcccgctttggcttgtgctcagcttccttttggttgtgcttggtgagctttgcctttcaccggtcggtttatccgtcacaacgaaacttgcgcctgccgctttctcagcgcagacgatgagtatgtggtttttaacaaacgcctgcggtcaagccctgaacgcaaaagtagtcggtttgtttgataagatttctgaagcggcctacttcggctcaatcggtcttgtttcgatcattctcggtattattttgattcttctgtctcccgtcattaaacgggcgatgaaaggcgttcaataacagataaagaaaagcctgcggaatcgtccgcaggcttttttgatgcgtctattgttttaactcctcaagcgtttctctccatctcttcaagacatcttccggttcgtggagctggatggccggtccggatgtcagatccgcgtatttcgcccgatcttccttgacggtgatcacccggcagctgaaccgttcccgctcgtgtttcgcctctttcagcggcggaagcgcctcacattccaatgtgacgtaatatgcggctcctccgtgccaggcgatgaaaagagcttgtcccgaatgcagcaggctgcttacggtcgtcgtgtttttccataaggcgagccggagatttgttctgctcacggccacgatttcaccggcgctgatcatggccgcgtgcggacggccttcttttgtcacggattggagcacaaatgcgtcgtgctgctttttttcaagctccgtcccgtctaaaagcgtgtaaagcgcctccggcaagtgctccgtcagcattatgcttttctttccgggacagcgggtacatgtgcggccgtctccgtttctttcggatcgattttaaatgccgggttgaatgccgccggattcgtgatgctttccggttcacaggatctccatgtgaaaaagcaggtttggcattggtaaatttcccaggcgcctttgaccggcgattggctgacggtttctccttttttcgattcacagcgcgggcatgttttcattgcaacctcatcctttcttattgattcattaagtccatcagtttttgttcccactctttcgttgtcagcggagaatcaagcggctgcgaataatggcctcttgtttccggcgcggcgggcgtcgtggcgtcaagaatcattttgtgtgtcatccctgccggatcagaccccgggtcaagcggaaggacggacaggtcaggaatgatgactgcatcgtgtttcggatgcattttcgttgagagcgcccacatgacttgcggcaggttaaacggatcgacatcctcatccacgacaatgaccattttgcagtagccgagtccgtgcggcgtggtcagggcgcgcatgccgaccgccttggcaaatccgccgtagcgcgttttcgttgaaatgatggcgatcaggccgtgcgtatacatcgcgttcacggcgacaatctcgttcggataagcttccttgagctgctggtaaagcggcacgcacgtattaatgccgatcatataatcgcactccgtccacggcatgcctaagtataaatgttcaaaaatcggattgtttctatgatatacccgtttgattttgatcaccggcatgctgcggccgccggaataatggcccgtgaactcaccgaaaggcccttcgtattcccgttctcccgcaaggatctctccttccagaacgacttcagcgccccaagggatgtctaaatcagataatttagatttgacgattctgtagggctccccttgaatcgcgccggccatttcatactcggattgatcgtataacagcggagttgacgcagctgtcgtaatcaccggctcacagcccagcgcgatcgtaacgggaagattcacgccgcgttcttcagcttggcgaagatgaatcgcaatatcatgctgaggcacgggctgaatgccgaggcggtcttttccctttacctgcattctgtaaatgccgacattctgcttgccgaaattgtccggatcttcaagatcgcgggaaatgacacacgctttatccaaatagtagccgccgtccccctggttgattctgaatagcggaaggatgtcaaatagattgatatcttccgttatttcattttcatgaaacggcgcggtttcttcccgtttgaccggcatcggaaatgcatcgtaccgtttggcaaactcaaagaattgttcctttacaggcgtatctttcggcatgccgagcatcatcgcgtgattcggccacgagccgatgacattcagagccacctgcgcatggtgatgtccgtaaatattgttaaacaaaagcgcaggggttttatccccgagattgctggctgcacgcgcggcggcacccagatccggctccggttttacctcttcgttgactgttaagagctgcccttctttttcaagagcggcgagaaattccctaaaatcctgataggccattatcagattcctcctttttgtttttcaattccgtaccaccgtttcgcttccggcagacggatgccgaactgatcgagcgtccggaacacaatatggtcgatcaattcatccatgtcagccggcttgttataaaatgccggcatcggcggaagaatgacggaacccatttttgtaagcgctagcatattttctaaatgaatttggctgagcggcgtttctcttgtcagcagcacaagttttttccgctccttcaagatgacgtcagccgcccttgtcagcagattgtcagccattccggtgcggatgcttgccagtgatttcatgctgcacggagcgatgatcatcccgtccgtttcaaacgagccgcttgaaatcgccgcggcttggtctttgtgagaatacgtataggatgcgagtttctcgacatcttttaacgtataatcggtttcatgtgtaatggtgacatttgcccaaggagacacgacaagatgggtttcgatctccgcggcttttaaatattctaaaagcctgatcccgaatatggctcccgttgccccggtcattccgatgacgagcttcatattgacccctcctttacgcttgaaatgtggtgtcaaaaccatcatactcctgatatatccatatgaaaaatattcgttaaatctatgtatcataccttaaaggtataaaagaaaggagcgcgttctcatggatatccggcaattgcgttatttcatcaccattgcccaagagcagaaaatcacgacggccgccaaaaagcttcatatggcacagccgcctttaagcagacagctgaaacagctcgaagaagaattgggcgtcattctgtttgaccgcaataaaaagaaacaaatgacccttacatatgaaggaaatgtctttttgaaaagagcgaaagagattcttcataagtttgaggatgccattatcgaggtacaagagctgaaggaggcggtggccgggacacttgccgtcgggtcaaccatttactgcgccgcgctcatgcttgagaaagtgtcacagatgaaagagcggtttccgcatcttacctttaacatttgggaagatgagcctgtctcactgctcgagcttctggaaacccggcagattgacgccgccgtcaccaccaccttgattaaaaacgacggcattgaatcgaaggagcttgaagacattccgtgtgtattggtgctgtccgagcattcaaaacgactgtgcggtgaaacgattaaactgaatgacatcgcctctttgcctttgatccttttgcgcaccgtcaatggaagaggtgtgtatgaccaagtcctccaagtttgtgaacagtacggtctcgaccttcaggttgtctgtgaatgtcatgactccgcgactctcttgagcctcgtatcatcagggttcggcgccacaattctgcctttgacgatgattcccgtccatatgcgctcgcatgtcaaaacggttatcatcgaagacaacccgtttgtcatgacaccggccgtcatctggagaaaagacagctatctgccgaagccggtcagacagtttttggaattattttgatccggaacacgaagaattcccgcttatgaaaaccaattacttgactcatactaaaaaaaagttatcctttacaattgggagctattttttctcaataaaactactcagaaaagtggggaataaagaagatgaaaaaagcattattcgctttgttcatgatggtcagcatcgcaatgcttgcagcctgcggaaactcacaggacagcggatctaagtcaaaagacggcgatctttgggcttctgtcaagaaaaaaggcgtactgaccgtcggcacagaaggaacgtacgaaccgtttaccttccatgataaaaagagtgacaaactgaccggatatgatgttgaagtgattcaagaagtcgcgaaacgcctcgatctgaaagctgacttcaaagaaacgcaatgggacagcatgtttgccggattaaacgcgaaacggtttgacgtcgttgccaaccaagtcggcaaaacgggccgtgagaaccaatatgatttttcggataaatacacaacgtcaaatgcagtcgtcgtgacgaaaaaagacagcacgattgcgaaagaggctgatgtcaaaggaaaaacagcggctcagtcattaacaagcaattacaataaattagcgaaagaagccggcgcgaaaattgaaggcgttgaaggcatggctcaatcccttcagctcattcagcagggccgcgctgatctgacttacaacgataagcttgccgtactgaactacttaaaaacgtccggcaataaaaacgtgaaaatcgcgtttgaagcaggccagccgcagcagacgtatttcgcattccgaaaaggaagcggcgaacttgtgactcacgtcaacaaggcgttaaaagaaatgaaagaggacgggactctttctaaaatagcgaaaaaatggttcggcgaagatgtttctaagtaacatgccggaacccgtgattgcaacagccattccttgggatctggtgcagcagtcattctggccgattctttccgggggaatctattactcgattccccttaccattctttcctttatttttggaatgatcatcgcgctgattacggcgctcgccagaatgtcaaatatgaaaccattgagatgggtgttcagcgtatacgtatcagcggtgcgcggcactcctcttctcgttcaattgttcatcattttttatctgttcccgacatttaatattacgctggaccctttcccaagcgcagtcatcgcgttttcattaaacgtgggcgcctacgcttctgaaatcatccgggcatctatttcatccgtgccgaaagggcaatgggaagccggttatacgatcggcatgacctatcgcaagacattgttccgcgtgatcctgccgcaggcgtttcgcgtgtccattccgccattatcaaatacatttatcagcctgatcaaggatacatctctcgcgtcacagattctcgtcgcggagctgttcagaaaagcgcaggaaatcggcgcgcaaaaccttgatcaaatcttggtcatctatattgaagccgcctttatttattggatcatctgcttcttgctgtcaatcgtacagcacgtgatcgaacggcgtctcgaccgttatgtggccaaataaggaggtttcgatatgctttccgtcaaaggattaaataaatcattcggacagaatgaaattttaaaaaagatagatatggagatagaaaaagggaaagtcatcgccgttctggggccgtccggttcaggaaaaacgacgcttctgcgctgtctgaacgcgcttgagatccccaatcgcggcgagctggcattctccgatttttcaatagatttctccaaaaaagtgaagcaggctgatattcttcgcctccgccgcaaatcaggcatggtctttcaggcgtatcatctgtttcctcaccgcacggcgcttgaaaacgtcatggaaggacccgttcaagtgcaaaagcgcgacaaggagcaagtcagaaaagaagcgatggagcttctggaaaaagtcggactgaaagacaaaatggatttatatccgttccagctttccggcggtcagcagcagcgtgtcggcatcgcccgcgcgcttgcgattcagcccgagctgatgctgtttgacgaaccgacgtcagcgcttgatccggagctggtcggcgaggtgcttaaagtgattaaggatctggcgaacgaaggctggacgatggtcgtcgtcacccatgaaatcaaattcgcgcaggaagtggccgatgaagtcatcttcattgacggcggcgtcattgtggaacaaggaccgccggagcaaattttctccgcgccgaaagaagaacgcacgcagcggtttttaaatcgtatactgaatcctttgtaggagcgggagaagaagcgaaacactgatttcgcttcttcttttttttggcggttatgctacaatgacaattaatgaaattttatgaaagaagggacctctttgaagcgggaattcttgatgcgctggacgttttattttgccggtctgttaattttgtctttcggggtatcgttaaccattaaaggaaaagctctcggcatcagcccttgggatgcctttcattatgggctttttcagcatttcgggctttctgtcggccaatggtccatcgtggtcggcgcggtcatcgtggctttaacctgcctgttcacaaggacactcccgaaaatcggcgctatcttaaacatggtgctgatgggaatgtttattgatttcttttcgtttctgcttcctgagacgcacgctttttccttagcggccgtgtttttttctatcggattgctgctgatcggctgcggcgtcggtatttacgtatcagcagggctcggcgcgggcccccgggactctctgatgatgctgatatctgaaaaaacgggctggaacgtgcaatgggtgcggaacggcattgagctgacgattcttgccgcagcctggatgatgggcggaccgatcggcgccggaaccattattacggctgttttgacggggctgattctgcgtttttctttgccgcagtcctctaaactgttaacatacgcgatctccgggcgggcaacgtccgttcattaaaaacaaagccgaaacggttttgtttttttattttcggacagctttcgtctgatatgataggatggttttgacaatattttcagacggaggatcggacatgaagatttacggagtatatatggaccgcccgctttctgcaggggaagaggatcggatgatggcggccgtgtccgccgaaaagcgggaaaaatgccggcgcttttaccataaggaggatgctcaccgcaccttgatcggcgacatgctgatccgcaccgctgcggcgaaggcttacggacttgatccggcagggatttcattcagcgttcaggaatacggaaagccgtacatccccgcgcttccggacatgcactttaatatttcccactccggtcgctggatcgtgtgcgccgttgattcaaaaccgatcggcattgatattgaaaaaatgaagcccggcacgattgatatcgccaaacggtttttttcgcccacggaatacagtgatctgcaagcgaaacaccccgatcagcagaccgattatttttaccatctgtggtcgatgaaagaaagctttatcaaacaggccggaaaagggctttccctgccgcttgattcattcagcgtccgcctcaaagacgacggccatgtgtccattgaacttccggacggacatgaaccttgtttcatccgcacatatgaggcggacgaggagtataagctggccgtttgtgcggcgcatcccgatttttgtgacgggattgagatgaaaacgtatgaagagctgttataagcaatccgtcagcattttgatgcctcgcgtgatatcccctgtcttgacgttggacacgttgagtttgatgatattttctttcggaaaatccgataggtaatggctctcaatcggctccaccagcacgccttgcgctttcagacgctgcacaactcttgaagcggaaaggcttttctccagcacgagatgggtatggatcgacgtttgctttacagaaaaaccgccgtactcctgcagcgcgttttggagcagctcggaacgtgctctgtaagaggcccggattttttctttatgccttttgaacatgccgcttttgatatacacttcaagggccgcttgggatatcatcgaacagtcgatatcgctcagctttttatacgtatggaaaaccggggccagcgaatccgggagcacagccgctccaacacgcagccccggaaaaatcattttcgaaaagcttttcaaataaatcacgcgggaagacagatcgtaggcgtacagcgggtctgccttctgattgtcctctaaatctcctaggaaatcatcctcaaccaaataaacgtcatacgcctccgctaatcggacaagctctcgtttttgccattctgtcagagagctgccgagcggattatgaaatcggggcatcgtgtaaaaaaacttaatttcctccgtctgaaacagccgctcgacttccgccatatcaagcccctcagccgtccgtttaatgccgcaggcgggaaggcgcagcgcttcaagctgctccaccatcagatgatagcccggctgttcgattaaaatcttcttttttccgttcggaaacggcatcagagacagcagggataacgcctgctgcacacccgaggtgataaaaatgttccgctcttttgcaaatacctgataatcggataacagcgtctgaagcacccggattaaagacggaagcccctgcggcgtgccgtaaatgaacaaatcatttttatacatatcaatggctttgttgatgcaatgctgaaagtcgcggtacggaaaaatatcagggtccggcgccgaggctgcaaaatcaatgatacctgtttgttctcgctcctgctttttttcatttttaataagatagtagccgcttttcggcacggcataaataatgtgccgtttttcaagctcctgaagcgcacggatgacggtgcttttactgacgtgaaaacgctcggccagctgcctgatagaaggcagccgcgccccttcctgaaaagtgccgccttcaatgagactctccacttctatcatcacgttcatatacttttccatgctgaacctccatctgtaccggtacagtttatcattattctcattgtactgcttcttcccttcccatacaataaaagggagcggccggcgctcgatctcattaaaggagttcgtaaagatgattaatcaaaaccgtttggctgctgcttacctcgctgccattttaaatgcgctgattatcggtttttcctttatatttgtcaagattgcgcttcaatccgccaatccgtttgatatattggctcatcggttcacagcggccttcatctgtgcaatgcttcctgttttattcggctggatcaaactgtccgtcagctggaagaatgtgctggcgatcttgcctttggcccttttatatccggctttgtttttcagttttcaggcgttcggccttttgtattcttcatcatcggaagccggtatcattcaagccgccatcccgatttttacgatgctgttttcgtcttactttttaaaggaacgtccgacatgggcgcaaaagggattcacatgcctgtcagtggccggggtggtatttattttcacaatgaaaggggtgtccgcggaatcggcgagttttaaaggtgcttgcctgatcctgttgtccgcgctgtcctccgccctttacaatacggcagcgagacgcatgacccagcgtttttcattgggtgagctgacctggtgcatgtctgcgatcggctttgcttccttcaactgcatcgctctcttccggcacggagcggaaggaacgatcgggcagtattttctgcccttccgcgatcccggttttatcgcagcgattctgtatttaggcattttgtcttctctcattacatcattgatgtcaaactacgcgctgtccaagattgaagcgtttaagatgagcgcctttaacaatttttccgtcctcgtgacgatgcttgcgggtgtcctcgttctccatgagtcactccgctggtatcatatcgccggcgccgtctgtatcgtcatcggagtcttgggaagcaatgcttcaggacggcggaaaaaaaacatattacgacatagggaaaaaatgaaaggaaacgaagacggaatatgatcaacacacgaaatgaaaatatctatctcgcgggctgcttaacatttgccgatgtaagaaaacactttgcttatcatcaaggaaaatccgcggctgtctgttttttgattatgctgctggcttctgccatctgttttgaaatgaacggcccggttacaggcggcacatggggcgtcagagctctcctgaatttccttgcagctgtgattctctctttggcagtcacggtgatcgcaacggcaatctcattcttccgtctttatagaacatacaaaacgaatcagcggctgaaatctgccagaagtattacgattcatcagctcggaatcagccaaaaacaaaaaaacgcaagcattctttttgaatgggatgaactgctctcggctagggagcacaaagatatgtttcgattacaaacatcgggttacggaacacttctgctgccgaaacgacttttctattcgcaaaaagatatcgccgttttcaggcaaatgctccgggaaaatgtgaatgggaaagtaaatgtaacagaataaaagacaaaaaggagggtgtccccctccttttttgtcagcctgatatttccgcctgtttctgcagctgctttgcttcctgataaatttcttcgaacagatccgcgatgtgttcttcttcaacacatgaaaatgcgattcgcaaatcggtttcattaatggatatcgtcccgattcctctcttttcaagcaacgacactctcaattcgccggcgtttatgtctttcagccggacacacatgaaataaccagagttaaacgggtaaggcgtccatacgtcatcatagtgcttgttttctgcaagaacggctttcactttgtcagcccgttttttcatgatgttatatttcagcgatttttctttctcgtattccggtgactgcatcgcccgcagcataaacgtttgggacgggtgcggggcgcttgaaatcgttcccctgataatcccttttgttttttcctcgagcacgcgcagcgctttttcgctttttgtgctgtacgtaataaaaccgacgcggaagccccacgcgtaattttccttcgtcgcgccgtctattttcacgcaaagcacccggtcgtgcacttgggcgagtttgctgaagatggattcctgaatggccgtttcatcgtaaaacagattgtaatacgcatcgtctacgagcacgacaatctctttgccggcttctgccgcctccaggatcacgctgacgatttctgacgcttcctcttctcccggcgtgtagcctgtcggattattcgggaaattcagcacgacaatcgccttttcttcctgctttttcagcagctcggacagccccgccgcattaaaacgcccatcctgctgaaaaagcgggtaggtctcaatggatgccttgcgccggacaccgaaaatgaaattgtaatttccccaatatttatcaggcagaagcagcgtatccccttcattgacgaacaagtcggcggcaatgctcagcccgtgtgttaaagcgtttgtcacgatcggcgtgctgatgtctttgccggctaatgaaggattttcgagacgcatttttttcagccattcctgtctgagcggctcttttccctgcggcggagcataatcgtagatatcatcggggttataggcggacagtgtctcttgaatatgggaaaagtgcatggactcgccctgtgaggtggcaatcccgatcgtggcattatactttccggccttggctttcgcttccgccgattgtgtcagcacccctttcggataaaacaactctctgcccaaatcagaaagcatatgaagcacgtgcgggttttcttcagataatgttctgttcagctcttttgctgcatcattcatgtacgacaatcccttcaaaattatattccatcaaatcataacataaaatttttgataaatgagaaaactcgcgggcggattttgttacaaaaaacagacagcgaatgctgtctgtcatatcctataacaattggcctgcagtgctcctgttaataatctcatagattcgttccgccactttttcagtttcacttaatatgaacatgtggccgtccgaaaactcatgaaatacgggattgtcggcccattttttccatccgtccgcatctttgatacattttttatctttccgcccgttaaatatatggacgggtgattgaatgatgtgagaatcagacggacggaagctttcaagcgcgcggtagtcggatctgaaagaaggcaggaaaaatgacatgacttccttattctccactaactcctgcggcattccgccaagctcgataatatgggcgagaaatttttcatcatcaagatgagacacttttttcctttcaacatgcggcggctgaatggctgagatgatcacggcctgcgggtaaatgccctcccgctccagcttttgcgccagcctgaaagcgaccatgcctcccatactgtggccgaacagcacaaacgggcggtcgggatggagattcaactcctgcttgtataaactgacaagctgttcaaaatcctcaacggcggacatttgatttgttccgtgtcccggcggttccgcggcaagcatctcacactcaccttgaagataggtgtggagcgggcggaatgatgcggaatagcctcctgcgaacggaaaacagataagctgcgttttttccgtggtatcgaacgatttaaagagctggaccattggcgggcttcctccttttctatcgtgaagttgtcagcttcagatgttccttccttaggaattcgagcaaatatgccgcattcctttcgagacattctccctgaagcatttctgcgtgagtaccgcagccttttttcacacggtattcacctgtcgtggcttcctcccacgaagcgagccacggcggcatcgcaaagtccggttctgacgttaatagatctatatccgctttgaccctgccggtgctgacggtatgcacaaaataagaataaaacgcgtttgtttttttggcgagaccttctttgacggcttcgttattcagcgcttcattgtcccggtttaccttcatcagcgcctggacatcactttctacggtgcggccttccaagtcgctgacgccttgttttttataggaatcaaccatgatcagccgctccactttacggccttcggcttcaagccgtttggccgtttcaaaggcgagcgtgcagcctgccgagtatccgaacagcttgaccggtccttccggctggagctgattgatcagctctgtgtagcgttcgatgcggttgtcttcctcgataaaatcaaacgcacagattttatagccggacagctgttttgccagcggctggtacatcagcccgtaaccgagaaccggcgggaacgcaaacagtgtgtcagactgatttttattcatgatggtgagatctttcattcctttttcttcaccgtgaagcagataaccggcaatgtctgcgattgtcgtcgcttcgaataacagctgcaccggaatgtccgtaccgagctcttttttaatgcgcgacgctgccgtcatcgcttttaaggaatggcccccgagcgcgaagaaatcatcatgaatcccgatctgctgtctgccgagaatctcggaccagatgtgtgcaatcgtttcttccgtcgcgtttcgaggcccgatccattctttcgccgcctgagcctgatccggtttcggcagctgccgtttattgaccttcccgtttgtcgttaacggaagctcctctaagaaagtaaaggtttgcggcaccatgtaagcaggaagctgttttttcaggtgcctctttacgtcttcagctgaaagcggcgtccggttcacgaggtaggcgttgattgatgcatctccagactcatggcggtccgcaacaacgaccgcatctttcacacccgggtattcctgcagctgcttttcgatttcttcaagctcaatccggtgtccgcgtattttgacctggtcgtcaatacgcccggcgtattcaattgttccatccggcagccagcgtgctaaatcccctgtgcggtaaagcgtttctcccggcttgaacggatttgggataaacgtttgcttcgtcaggtcatgacggttcagatatccttttgatacacccattccgctgatgcacagttcaccgacagctccgaacggctgaagctgattttgcccgttaagaatataaacactggcattgctgatcggctttccgatcggcaatgaggaaatggaatccggtatgtcgtgcacgacgtgagctgtcgcaaacaccgttccctcagtcggcccgtagcaattaatcagcttgccaggccccatgatctcaagcgcctttctgacgtgaggcactgacgcgcgctcacccccgaataacacacagcgaagccccttcagccactcctctcccgcatcggtgagaagattaaaaagtgcggttgtcgcaaacatgacattgacattctcctgccggatcagatcagtgagccgttctgtatcaagcagtgtatgttcatctgcgataatgagccgtgccgcattcagtattgatgcgtagaaatcaaaggtaaatgcgtcaaaggcgtaattggaaacagataagaacgtatcttgttcagaaaatgccatgtagtctacatgcttgaccaatccttgaatattggcatgagtggtgatattgccctttggctttccggttgtgccggacgtatacataatatacgccggatcatcgggatcaattgcggctgcaggatcgcttgcctgttcctcaaaccgtgctcgatcatcgatgatgagtgttgttcctgtatacggcagctgagccgctttttctttcatctcctgatgtgtcagcagacaggctgccgcactgtcagccagcatgtacgagattcggtcctccggcagcttcggatcaacgggcagataagccgctcctgcttttaatacgccgagaatgccgatcaccagctcaagcgagcgcttcgtgtacaacgcgacaacggtgtccttacccgcaccttgcttttgcaaacggcgcgcaagacggttcgcttcctcatctaattcgcggtaggaaagagtctggccggaatacgtaagcgccggtgcatctggatttacattcaccgcttccttgaaccaatctgtcagaggcttcgcctgatgagtctgagccggcgggtttaagccggtaagcagaagctctctttccttttcatcaacaagtctgatcgtattgacaggctgatccggcttctggatgagctgctgaatcgctgtgagaagctgagattttaagcgcaggataaacgcctcatcaaacacattcccgttataggcaagcttaatcagcatctcatcacctggagaagccatcaggttgagatcataattcgatttctcaaatacatggacgtcctccatatcaaagccgttttcactgttttcttcattttttgcatcctgaagcggataattttcaaacacaatgatgtggtcaatcagctttggctgatcggcctggctttggatatcatagagcggcacatattgatgcggctcagactgcagcgattgctcctgcagctgcttgagcaagccgttaaatgtggtatcctcagacagtttcacccgcctcgggacagcattgataaacagcccgaccatatgttcaacgcctttgatttctgcgggacgcccggaaacgactgtgccgaagatcaaatcgccggactgctggtagcggctgattaatacactccaaaccgcctgaagcgccgtactcaaagtggtatgctgcgattttgcaagctcggtaaatgcttttgtttccgcctccggcagtgagaagagcagctctttcggctcatagccgtccttttgtttctttctttgctccgcaaatgtcgtttgtccttcaaaatcttctaagtacccgcgccagtaatgcagtgatgcttgtttatcctgcttttcaagccacttgatatagtctttatacggtttgaccggcggcaggctgtacggcttttgttcacgcagggcattgtataccttaaacaggtcctgcacgacgatgccgaagcaccagccgtccaaaatgatgtggtggtagctccacacccattcaaagctttcttccgattttttaaaaatggctgcccgcatcggaatatcccgcgtcaaatcaaagcccttgatcttatcctgttctttgtattcattgattttggctgtttgctcgctgtccgttacatgtgtcagatcgatttcttctatctgaaactgacgttttttcaatacgacttggaccggcctttttactttttcgtgaatgaacacggtacgaaatacatcgtaccggtccatgatcacattcatgctttcttcaaggcatttgatattcaagctgccttttactttcattgtcatttgttcgatgtaaaaactttggccgggattcaggagagtatgaaacagcattccctcctgcatcggcgacaaataatacatgtcctgaacctgatctttgctgaattggctcatctgctccgctccccccttctgttatctgtttttgtcacgttaaattctcctcaagcatgtcaaagatgtctcccatttcatccatctcaagatcctgcgcgctgaaatcgctcggcgtaaattctttctcctctttggccgtgcaatggcggatgatcattaagagattgtctttaaaccgctgcatctgtgtttcgacggtgcttctttcatattcttcctgattgtatgagcaggaaatgacgaagcggccgcctgtaaccatcccgctgaagcttagtgcgtataacgcctctgactcttcgctgacttgacgtcccatatcatatggagacggctcaaaccattccgttttcacttcattgtcaaactgccccaagtagttaaaactgatttcaggcgtgacgcctttttctgtttcatcggatgacagataccggagaatcccgtaaccgacgcctttatcaggaacgcgccgcaccgtctcttttaccgttttaatgacggaagagacgccgtcttccttgctgatctgcagaatcaacggatattgggccgtaaaccagccgaccgtccgtgaaatattgacattcggtatgatttcttcccggccgtgtccttctaagttgatgccgactttgccgttttccgtccattcaccgatcgttaagccgagcgcgctgagcagaatgtcgttgatttccgttccgtacggatgatgaacatctgtgagcagctgtgccgtttcttcctcagtcaattcacatttcacggccgccgtatgtttgacgagccgtttgttcggatcatggtctttcggcagcggccggagttcttccgtatctgcctgcgcccaataagccgcctgctttttcagctcttctgattgcgcaaatgtgttcagcgcctccgcccaatctttaaaggagtgggttttctgcgggaggacgatgctgttttgctgctgcgcctgtttataacctgaagcgaaatcctcaagcagaattctccatgaaaccccgtccacgacgagatggtgaaccgcgattaacagatgatcgccttgttctgtccggtattgctccgcttttaacagcgggccgttctccagatcaagacttccctgaagatgatcggcaagccgctgaatctggcttttcagcatatcctcgtcagttccgtacagatcaacgatttcaaagcttgccttgcattctgtgacagggaggtatgtctgaatgatgccttccctttcttcacggtaaaccatgcggagcgcatcatggtgttcaatcaatgcttgcagggttttttccaccaggtccggatcaaagccgtctttcgcgtgaagcatgacggattggttccagtggtgtttgtccgtgaagtttttctcaaagaaccagcgctggatcggcgttaaggccgcttcgccttcgacagggccctggtcggcctgcttgccttccgtccgctccacataagagacgagctcttcgatggtcggatgctggaagagatccttcatctccagcttgtagccgtgctggttcaggcggctcgccatttggatgcctttgatcgagtccccgccgagggtgaagaaattatcgcttacgccgatctggtcaagaccgagcacttcctgccaaatgtcggaaagcagcgtctccatctccgtttccggcgctttgtatgccgcgcttcccgcttcaatatccggttccggcaggacttttttgtcaatctttccgtttgcggtgaccggaagctcgtccatctccacccagaacgccggcaccatgtagtcaggcagcgtgtctttcagcgcggatttgagcgcttcaatatcgtcctgctgaggcgcgacataggcgcaaagcgcggtattgcccgctttgtcttccacggccgtcaccgctgcgtcatgaacgtccgcaagctgggcgaggcggacttcgatttctgaaagctcgatccggtagccccgcactttgacctgctggtcgatacggccgatgtattcgatgccgcactgcgcgttccatttgacgaggtcgccggtccggtacatgcgctcgccgggcacgaacggatctgcggtaaaccgcttcgccgtttcttcttcacggttcaggtatccgcgcgcaagaccgcggccggccacacacaattcaccggcaatgccttccggctgcacctgatcgccgtcgccgagaatataaactctcgtattggcaatcgcccgtccgatcgaaagcgatccttcctccggattgatgacgccgcttgtcgcgacgacggtgttttccgtcgggccgtagttgttgatgatcgtgtacggctgtttcaccgcccgcttcagcttgtcgccgccgacgagaagcatgcggagagaggtattttccagctccataaattgttcggccagctgcgtcggcaggaaggtgatggtcacgccgtgctcttcgaaatagtgatttaagcgggtgatatccagccggatcgcttcgtcaatgacgtgaagctccgcgccgatagtccatgtcgggaacatctcccagatggaggcgtcaaaaccgaagcccgcgtatttggcgcttttatcatccgccgtcatggcgaatgcgtcgtgatgccagaaacacaggttcaccagcgcatggtgttcgaccatgacacccttcggctgtccggtcgttcctgacgtgtaaatcatataagcgagatgatccgccgttgtttccgtctgcgggttcgcttcatcgttttcatcaagcggcaggctcagaatggagcgtccgccgtcaagcagaatcgtttctcctttgtagctttccggcacgcccagcgcttcctgtgtgagaagaagcttggcgccgctgtcctgcaaaatgtagctgatccgctcttccgggtagtcggggtcaatcggcacaaatgccgcgcccgctttcaggacgccgagtacgcccgcggccatttccaaggacggtttcgtcaaaatgccgacacgttcgtcagccgtgacgccgcagtccatgagaatgcgcgcgatgcggttagcccttgcgttcagctcgccgtacgtccatttcgcgccattgtatgccgcggccggtcggttcgcgtagcgggcggccgtatcttcaaagagacggtgaaccgttttgtcccgcggcacagaaagtgtttttcctttccatgcgtcaaggagggcttgtttttcagcatcgctgatcagtgaaatctcaggcagctttctgtccggactttctgccgcttgcttcagaatccgcaggaacccggcgctccacttttcaattgtttcttttttaaacagatcagtcgcatattcaaactgaaggccgagaccttcttgatccgtaaagccgccgagtgtcagatcgaatttcgccgtgccttggtttgactcatacggagtgatgcgcaggttctccagttccagtgtttctttatccggatcttctgtcgtcaccataacctggaacaatgggttgcggctcatatctctcggcaggtcaagctttccgatcagatcttcaaacggataatcctgatgcgccagcgcgtcaagattggtttgtttcacccgttcgagcagcccggcgaaggtctgctcttttcgcgtttcattgcgaagcgcaagcgtattgacaaacatccccggcatttcctgaacttcggcgctcgttcttccggcggtcaccgagccgataatgatatcgtgctgccccgtgattttgctcaaaaagacatggaacgcggcgtgaagcaccatatgaagagtcgctcccgatgattccattaattcacgcaccgctttttccgtttcacgccccgctctgaaacggacggattgtcctttaaaactttgaaccggcggacgggggaaatcggtcggcagattcaattcaggaagctcgccggaaaatgcggagagccaataacgctcatggtctttcatccgttcggcctgctcgggttcattctgccagacggcgaagtctttatagtgcaggttcggcgacggcaggcttccgcctttgtaaagatgagcgagctctttgaccagcatacttctggacacgccgtcggcaataatatgatgcatatccagcagcagcaggtgtttcttttcattcagtctgacaagagcggcccgaatgagcggagccgcactcagatcgaacggcttaatgaatgcctgaatgataagatccgctttctcctcgtccgctgcttcaaagatgtgcaggtcgatgtcagcctgttctgcgatctgctgcatcgggcggccgttttgatcgataaaggacgtccgcaaagactcgtggcgattgatcatctgattgagcgcttcctgaagccttgaaatattgacttctccttccatcagaagaacggacggcatattataactgattgtctcccggtcaagctggttcaggacgtacatccgtttttgggcggatgataacgggtacgcgtctgcactgtcggcaggtgagatcatccgatatccctcagataccgctgatttttcgatatatgcggcaagcaggcggacagtcggctgttcgaacagcgcttttaacggaaccgttttgtccagttcagcctgaatattggcgaggagcatcatgccttttaaagagtgcccgccgtaatcgaagaaattatcgtcgatgccgagcgtatccgtaccgagtgtctgtttccaaatgcggcacagcttttcctccaattccgtttccggcaaggctgaagctgtttgcgccgtttggctgacgcccggtttcggaagggcgtttttatcggtttttccgttggctgtgagcggaatgcggtctacttgtatgaaataagccggaagcatatgagacggcagtgtttcggaaagccgtttgcgaagctcagagcctttcagctcgctgtcggctttataatacgcgcacagttccggcagcccgccttcgctgactgcgagaacgaccgcctcctgaatgccgtttacgcttaacagcacggtttcaacctcttttaattcaatgcggtagccccggattttcacctgatcatccgcacggccgataaattcaatcgtcccgtcaggaagcctgcggacgacatctcccgttttgtacatgaggctgtccgacgaaaaaggatttgagagaaatttctccgccgtcagctgcggacggtgaagatatcctctggcaagccccttcccggtaatataaagctcgccgcttgcgcccggaggaacgagctgcattgctccgtccaatacaagcgcgccggtatttgcgatcgggcggccgatgacgggacgctgctcatattgatcaagacgctccatattgatccgttccgcaatggcgccgatcgtcgtttccgtcggcccgtagtgattgatgaagtcggtatgggcgtatacgtcatgaaacttgcggacatcggacgtgatgatcttttctccgccgagcaccactaaacgaagcgggctgaaacggcgttctgacgtaaaacgggctgtattgacgatcatatggaacaatgacggcgtcagtttcatatacgtaatgccgtttttctgtatatactcaccaagctgatcaggcgcggtgtacgtctctttcggcacaatgtgcagctcgccgcctgcctgaagaatcggaaatatggccgtatagccgagatcaaatgcgtaagaagacagcagcacggatttgtcagcttcggtcaaaccggcttcacggctgaaccatgtaacataattgattagattgcggtgctccagctggacgcctttcggtttgcccgttgttcccgaagtataaataatataggcaagctggtcggcgccgggctccgtttcaagccggtcggcgctttcgttctgccattctccgtcttccattacgaccgtttttcctttataaacggcggccgcggtcatgtttctctcattgacgaccagaagcttcgttccgctgtcttcgagagagtagcggattctctcttcaggagtctccggatcaatcgggagaaatgccgctccggctttcatgacgccgagaatcgcggtaatcaagtcggccgaacgatccatcataatggccacgatgtcctcactgcccgttccgcaagcctgaaggtggcgggcaaaccggttcgagcgttcatcaagctcacgatatgtcagacttattccgcccgcaaccgccgtgagatcaggcgttttttgcgcttgccgttcaaacagcgaaacaaaagtgccctcaggcagatccgcttccgtacgtttttcatcagaaaggagcgcttcccgttcaggagcggacagcaggcttgcgtcggccagctgaatatccggattttcagcgcaggctttaatcagattgacaaaatgagcgctccagcggcggatggtttcgtccgcaaataaggctttcgcgtaatcaaagctcaatccgacctcttctccgcgttcagccgcttctaaggaaagatcaaatttagctacatgatgatgcatggagtatgaagaaatctccaaatctccgagccgcagggccgggatctccatgttctgcatattaaataacacgctgaacagcggactccggcttgtgtccctcgttaacggcagtttttcaattaattcttcaagcggatagctttgatgctcaaaagcttgaaggctcgccgttttcacctcatccagaaattgtttgaacgtttttttgccggcaggatgcgaccgaagcgcaactgtgttgacaaacatgcccggcacgtcttggagatcaggatgctgtcttccggccgtcggagacccgactatgatgtcttcctgccccgaatatttggacagcagcacttgaaaagcggctaacaagaacatgtacatcgtcgtatccgtatcagccagcagcttcttaatctgcgccgtcacctgtttatcaagcccgaagatgacgcgttccccttcaaaactgcgctcggcaggacgcgggaaatcaagcggcagatccaacaccggcagatcgcctttgaacgtatcaagccagtaggcttcgtgctgatcgagacttgctttttcacgctgccagactgaaaaatccttataatgaatctttggcagcgcaagctccgtgccttgataaagcttcgcaagatcaccgatgaaaatgcccattgagcttccgtccgtaataatgtggtgcatgtcaatcagcagaagatgccggtcttcttcaagccggatcagcttcgaacggacaagcggcgcgcggttgagcgcaaacggcctgataaaggcttttgtcagctcttctgcatcttcttcccggccctcggcggtttcaagctcaaacgacacatttttgtgaatggtctgcacgacttctccctctgccatgtcaaacgacgtacgcagtgtctcatgacggttgattaatgcctgcatggcctcctcaagacgctttttgtctactgacccttccagcagaagtacagcagggacgttgtagctcgtgctggcctgtccgagctgattaaggatatacatcctgcgttgtgctgaggaaacaggataatgcttctgataaggcgcttgtcggatcggttcaaactgctgctcctcctcgctctcatgctgcaaataatgcgcaagctcctgaatggtcggcttttcaaataacactttaatcggcacttctttttgaaagtgctcctggattttagcggtcatcatcatggcttttaaagaatgtccgccaatcgtgaagaaattgtcagtcacacccgctttcacaccgagaatgccttcccaaatgtccgcgagtttctgctccgcttccgttttcggcgctacgtattctttttgaacggcttcagcctgaggctcaggcagcgcttttttatcaatttttccgttcgccgtcagcggaaactgattcatctggatgaagtgcgcgggaatcatatattccggaagtgattccgaaagcgttttgcgcaggtcttccggcgaaagggcttggtctgccgtaaagtaagcgcagatttcattttcatccgctttatttttccggatcacagccgcagattccgtcacattctccgcctggctgattttcgcctcgatttcgccgagctcgattctgaaaccgcggacctttacttggttgtcaattctgccgagaaactcgatcgtgccgtccggaagccacttcgccaagtcccccgtccggtatatcatttcatccggtctgaacggatcgcggacaaactgcttctccgttaattcagacaggttcacatagcctcttgccactccgcttccgccgacgcacagctcaccgggcgcgccgatcggctggaggttgcggttttcatccataatgtacgcagtggaatttccgatcggcttcccgatcgggaccgaaccgtcataatcctgatcaatgagaaaactcgtcgaaaacgtcgtattctccgtcggcccgtatccgttccaaagcgacagctccggtgatgcctttctcactttgctgacgatatgcggcacaagcgcatcaccgccgatgatgaggtgccggagcgtgttaaacatgccggcatccttttgggcaagctgattaaacagcggagacgtcaaccacatggtcgtgatccgctgctctttcagaaattgggcgaattgtccggcgtcaagcagcgtctcttttttcaccgggtgcaatgacgctccgttcagcaatgcgccgaagacttcgaaggttccggcatcaaagctgacggctcccgtttgcgccatccggtcttcttcatgaaccggcacgtaattcgaatgtttgacgagcctgatgatatttctgtgttcaatcatgacgcctttcggtttgccggtagatccggatgtatacatgatatacgccaagtcgttgccgccggccggaagattcaagtctgttccgcttaccgtttcatccgcgctttcatccagcatgacgaccgggacttgcaatgcgcccgcttgttcttgatagccctgaactgtcagcacgagccgaatcgagctgtcttccgccataaagcggagacggtcctccggaaaagccggatcaatcggcacatatgcgccgcctgcttttaggacggcaagcattccgacaacggtttccgcagaccggtcgttcataatagcggcggtccggcctttttccagcccgctcttcacaaggtgtctcgccagacggttggccgcttcgttcacttcacggtaggtccattcgcgtcccgcttcttttatcgcgatgcttgcaggcgtccggtttgcctgtgtttcaaacaaacggtgaacggcctcctcttccggaagcgccgttttcgtatcattgaatatctcaacaatctgccgctcttcttcgcctgaaacaagaccgagttcccgcacgggcgcgtcaggcgttccgaccgcggctttcatcatgcgggtcagatggtgcgccgttcgttcgatggcatcatgagcgaaagccgctccgttgtatttgattttgacagtccacctttttcccggatacacgatgagattgaaatcaaagctcgtctgctcaaaagcatgttcaactttaatggaaaagccgagtctttcctccatgcccccgttttccagctctttgtccagcggatagttttcaaacgcgaccaaatgatttaagaggctgccgtccagggcggagcgcttttgaatgtcatagagcggcacataatcatagcgctcggcttccacggcgtttttctgaactgccgccatcacgtccgaaaaggctgcatctttgtcaattttgattctgacgggaattgtattgatgaacagccccgccatcgtttctatgccgttgatttctgaaggacggcctgatacgacggtgccgaacaccacatcgtctgtatagttgtatttgctgagcaccgcaccccaaacggcctgaaacaggttaggccccgtgacttgatgccggttggcggtctgctgaatctgcgcgaccagctcttcatcccagacaaaagaatattcttcattttggtagtctttcttttctgatgccagacggcccgggagcaggctcggctgttcgaaatccgccagtcggctgctccaatattgttccgcctcctcataatcccggcctccgagccatttgatatagtcagagtaaggtttgccctggcttcccccggcgggccggccggcacgaagcgcttcatagttttggaacaggcttttcatcaaaacgcccatactccagccgtccatgacgatatgatgattgctccagacgagatacagctccttctcactgagtctgaacaccgctgctttgaagagaatatctttcgccagatgaaagccctgctgctgcacgccgcgtttatagcgttcaatatattcggtttggcgcgcttcatctaattgactgatatcttcatagtgcaccttcgtcttccgctcggctaatacgacttggcgcggtttttgaagctgctggtgcacgaataccgtacgcaggatgtcatatgtccggatcagctcattgacgcttttttcaaaaagctccagctgaaaacttccgtgaatcctaagctctaattgtgtgaagtaggaggaagaatgcggatcaagcagcgcatgatacagcattccctcctgcatcggtgtgagtgcatacaccttttgaatcgattttttgctcatatgtcacctctgtcttttctgttagagaatttccattaatttatcaagttcatcaagcgtcagatcatcatcgccaagatcgctaggcgtaagctcaggtccgtcttgggccaggcagtgatctatgattttcaagaggtgccctttaaagctgtcactgaacgattgaatggttttttcatgaaattcgagagaatgataggcaaacgtcatcgtcatctgcccattttctataaatccgacaatatcaagcgcattcggcttctctgtgtcagggctcagcgattgtcctgacggcatcccggatcttgtaaataagccggaatccgacatctcattaaactggcctaagtagttaaagctgatatccggatcaatctcaaatgaaagattctctttatgctcaggcgccgttatataacgcagaatgccgtagccgactcctttgttcgggatgtgtctgatgtcttctttcatttgtttcagctgatatgaaagatcgtcggtgtgcttcatctcaaggatcatcggatacatgctcgtaaaccatccgaccgtccgggtgatattcaagccgtcaagaatgtcttcgcgcccgtggccttccaaatgaacgccgatcgtgtcttcacccgtccactctttcagcgccagtccgagcgccgtgagcaggatgtcattcatttcggtgtgataggcttcatgtacgtttgtcgtcagctgttcagtttgttcaggcgtcagagagaagctgaccgttctcgtatgtctcatgcgctgatcaccagactgcctgtctttcggaagctgagtgcatacctctttttcctcaagctctctccagtaatccgcttctttcagaaacgccttcgtatttgcgtattctttgattctctcggcaaattcggcgaatgaatgtgttttcggcggcagcgccggttcattgccttgcttcagctgcgtatacacggacgtaaagtcctccagtaaaatccgccaagatacaccatccacgactaagtgatggattgcgagaagaaggtggtctccatcttcagcccggaagagcccggctttcaagagatgtcctgtttccagtgaaatactgctttgaagacggtctgcttcccgttcgatacggtcctcatggtcttcagcaggtccgttcagctcaaagacgttcagttcaacagacacatcctcaagccctctgtaatacggtttttgttcacgataaatcatccggagcgcatcatggtgcaccgtcaggacatgtaatgttttttctgttatctccggatcaaagccgtctttcgcgtgaagcatgacggattggttccagtggtgtttgtcggtaaagtttcgttcaaagaaccagcgctggatcggcgttaactccgcttcgccttcgacagggccctggtcggcctgcttgccttccgtccgctccacatacgagacgagctcttcgatggtcggatgctggaagaggtctttcatctccagcttgtagccgtgctggttcagacggctcgccatttggatgcctttgatcgagtccccgccgagcgtgaagaaattatcgcttacgccgatctgatcaagaccgagcacttcttgccaaatgtcggaaagcagcgtctccatctccgtttccggcgctttgtatgccgcgcttcccgcttcaatgtcaggcgccggcagggcttttttgtcaatctttccgtttgcggtgaccggaagctcgtccatctccacccagaacgccggcaccatgtagtcaggcagcttgtctttcagcgcggctttgagcgtttcgatatcgtcctgctgaggagcgacataggcgcaaagcgcggtattgcccgctttgtcttccacggccgtcaccgctgcgtcatgaacgtccgcaagctgggagaggcggacttcgatttctgaaagctcgatccggtagcctcgcactttgacctgctgatcaatacgcccgatgtattcgatgccgcactgcgcgttccatttgacgaggtcgccggtccggtacatgcgctcgccgggcacgaacggatctgcggtaaaccgcttcgccgtttcttcttcacggttcaggtatccgcgcgcaagaccgcggccggccacgcacaattcaccggcaatgccttccggctgcacctgatcgccgtcgccgagaatataaactctcgtattggcaatcgcccgtccgatcgaaagcgatccttcctccggattgatgacgccgcttgtcgcgacgacggtgttttccgtcgggccgtagttgttgacgatcgtgtacggctgtttcaccgcccgcttcagcttgtcgccgccgacgagaagcaagcggagagaggtattttccagctccataaattgttcggccagctgcgtcggcaggaaggtgatggtcacgccgtgctcttcgaaatagtgatttaagcgggtgatatccagccggatcgcttcgtcaatgacatgaagctccgcgccgatggtccatgtcgggaacatctcccagatggaggcgtcaaaaccgaagcccgcgtatttggcgcttttatcatccgccgtcatggcgaatgcgtcgtgatgccagaagcacaggttcaccagcgcatggtgttcgaccatgacacccttcggctgtccggtcgttcctgacgtgtaaatcatataagcgagatgatccgccgttgtttccgtctgcgggttcgcttcatcgttttcatcaagcggcaggctcaaaatggagcggctgccgtcaagcaggatcgtttctccgttgtagctgtccggcacgcccagcgcttcctgtgtgagaagaagcttggcgccgctgtcctgcagaatgtagctgatacgctcttccgggtagtcgggatcaatcggcacaaatgccgcgcccgctttcaagacgccgagtacgcccgcggccatttccaaggacggtttcgtcaaaatgccgacacgttcgtcagccgtgacgccgcagtccatgagaatgcgcgcgatgcggttagcccttgcgttcagctcgccgtacgtccatttcgcgccattgtatgccgcggccggccggttcgcgtagcgggcggccgtatcttcaaagagacggtgaaccgttttgtcccgcggcacagaaagtgtttttcctttccatgcgtcaaggagggcttgtttttctgttttattcaccaatgaaagctcagaaagcttcgcagccggattttccgctgcggcttctaacagttgaagccagtaatgcttccatgtctctgccgtttccggtttaaacagcgcggtgttatattcaagcacaaacgttaaaccttcgtctgtgtcctcagccgtcattgtcaggtcaaacttggctgtttttctgtcaaacggatggtgcttcagctcaattccttccatgatcagatcttccgcatttgcattttgcattgagaataccgcatcaaacagcggatttctgctcgtatcacgctgcacctcaaccttttgcagaaggttttcaagcggataatcctgcgcgtcaaatgcatgtaaagcggtttgtttcacttctttaagatagtccgtgaaagttttgtccgcttccggatacgtacgaagcgcgagtgtattcacaaaaacaccgatgacgtttgctagatccgcatgtgaccgtcccgcaaccggcgagccgacaatgatgtcatgctgtccgctcagttttgagagaaaggcgctgtatgacgccagcagcaccatgtacatagtagaatccgtttgtttcgcaagactgcgaagagccgacgtctgttcctcagtcagagaaaagaccagcttgtctccttcaaaggtttgcacggccggacggctgtaatcagccggcagcgtcaataccggaagctcgccgtcaagctcccgaagccaatgctcctcctgcttgcggtactgctctgattgaataaatttctgctgccataccgcatagtctttataatgaatccgcaacggctcaagcgtttcgccaccatacaagcgggacagttcatctatcagcacgccgactgaagcgccgtccgaaatgatatggtgcatatcaaacagcagcaggtggtcatgttcagccagcttgaccagtcccgttctgacgagaggaagctgatccaggcggaacggccggataaagctctgaataatccgttcagcatcttcttcagaggcttcataatattccatgttgatatcagcttccgtccatatgcgctgaaccgtttctccatcctgtatgtcaaatgtcgttctgaaggcttcatggcgttctgtcagctgtttcatgacggatttcagcttttctgcatcaagctttccttttaagcggagcacagacggcatgttatagcttgtttcagcgccttccagctgctgaagcacgaacatccgcttctgcggtgaagaaaccggatacgtttcccgctcggccgccggtgcgatgctctcagccgccttccgctcagccccttcaatcagctgcgccagccccgcggccgtcggagaagtgaacagatcctttaaggtaagctgcgcgccgaatgtcttctggataagggccagcagtttcatccccgctaacgagtggcccccgatctcaaagaactggtcatggacgccgacccgctccatttgcagcacctcagcccaaatatccgccagtttttgttctgtttcattgcgcggcgccgtatatgacacggcattcgctgcggtcacatccggcattggcagcgcccgcctgtcgatttttccgttccctgtaagaggcagttcatccaattgaataaagacggacggaatcatataagccggaagatccttcgccgaatgctccctcagctcccgggaagagatttccctgaggccgacaacatacgcgcaaagaagtttgtcacccgcgccctgatccacagcgagcacaatgcattcctgaatctggtcatgactttgaagctgatgctcaatttcgccaagctcaatccgctgaccgcggattttcacctgatggtcgatacgtccgataaactcgatatcgccattcggaagccatctggccaagtcgcccgttttatacatccgttcaccttccttaaacggatgctttacaaatttttcttccgtcagttcaggacggttgtagtagccttctacgagtccttccccgctgacgcacagctctcccgcgatacccgccggctgaatgcgtccggctgagttcatgatgaagacttccgtattgctgaccggtttcccgatcggaacggagagcgtatcctcttcaatgacatccaccggatggtatgtcgcaaacaccgtgctttctgacggaccgtacatatgaagcagtcttccttttccgactgccgcaagcgcctttttgacatgttctacagacgctctttcgcccccgaacatgattttccgaagcgtcgtcagacaggacggctccatatcaacaagcaggtggaacagggccgtcgtaatcatcagaatgctgacgttctcccgtttgatcacacgggacaggcgtgacatatccagcacggtatctttcgggacgatcacaagctttgcaccgtttaacagcgaaccgaacatatcaaacataaaagcgtcaaaaacgtagtttgacagaccgagcactgtgtcctcttcagaaacagtcaaatagttcgtgttttttaccgtccgcaaaatgttggcatgtgtgacgatgtttcctttcggcgttcccgtcgtgcctgatgtataagtgagattggcaatcgttttggaatcaaacggcaatgctggattgtgagagtccttttcatagctcgcctcatcatcagcaagcacaatgacgccttgaaaaccggccttttccgcaagcggcttgaggctttgctgagtcaggagcacattcgccccgctgtcgcggaagaaatgctgaatccgctgaaccggatgctcaggatcaatcggcacataggcggaccccgcttttaacacagccataatggaaacaatcatatccattgaccgttcacacagaacagccgcggtttttccgccgcctccgaccgaaagaatatgccgcgcaagcatgttggcgcgttcattcagctgctgatacgacagggtttccccttcgaactgtagagccgtccggtcagggttctttcggacttgttcttcaaagatctgcacgatcgtttgatctttcgggtataccgtgcgttccgggttgaaccgctgtaattgattcaaagcctcccgttcagaaagcagatcatattcgctgattttcgcatccggctgagctgccgcgctttccagcagacggacatagtgcgcaagcatgcgatccgcagttgagcgcttaaacagcttcgtgcaataatccaaatcaagcgcaatgccttccgctgtttcccgagcctgcatggtcaggtcgaatttggcgatattgaagtttgtttcatgaagagacagcgtcagattaccgatctccgcaattccgtccgaagcattttgcagactgaacatcgtgtcaaatatcggatgcctgctcatgtcccggggcacgttcagctcctcggtcagccactcaaacggataatcctgatgagaaaacgcatccagcacctgcttgcgcacatgacctaacaagccggcaaatgtctgatcctgcttcacggagcttcgcagcgcaagcgtgttgacaaacatcccgataagcccctcggtatcggagtgatttcttcccgctgacggtgttcccacgatgatgtcttcctgtcccgaatacttagaaagcagcgtatagtatgctgataacagcaccatgtaaagggtggctccgtttttctccgcaagcttccgcagccgttcccgcagcattttcggcagcttggcggacacgcggtcaccttcaaagctttgcacctgcggccgcggataatcagggagcagctgaagcaccggcagttctccgctgaagacttctttccagtacgcccgctccttcttgtagccttctttcgcccgttccgcctgccatacggcataatctttatattgaatgcgcaattcaggcagctgatttccgccgtagatgtcagccagttccttcagcatgatggaaatagacaccccgtcagaaatcaggtgatgcatatcaaacagcagcatatggcgattgtgaccgagcgtttgcaggccgattctgaacagcggcgcctcagataaatcaaaacggcgcacaaagtccttcatgacctgttcattcgttcttccgcgcgcttcgatcatttcaatatgaaacggaacatgctcgccaatcacttgtctcggcgtgccgtcctctgattgaaacgatgttctgagcgcttcatgcctgctgattaaggcagaaaatgcacgctcaagcttttcacggtctaaagcgccctcaatcatggccgcagccggcatgttatatccgactcccgcgtcttcaaattggcttgcgatataagtccgctgctgagcgagcgaaagcggatagctcgcctgcttctcagccggctcaattgcactgaatgccggtccttcgtttcggttttccgcataatcggcaagcgccgcaatcgtcggatgctcaaacaagtattgcagcggaatttcaacgcccatttgcttatgaattttcgtcagaagcgtcattgcctttaatgaatgaccgcctgactcgaagaaatgatcataaatgcccgccttgtccattccgagaacttcctgccagatgacggcaagtgtttcctccgtttcatttcttggcgcggcatattcagatgagctgacagcctgcacatcaagcgcaaacagctttttgcggtccgccttcccgctcggcgtgagtggaatttcgtccgtttttgtaaagtaagcgggcaccatgtaatcaggaaggtgcttggacacatactccctgtactcggcagggtgaaactcggttcctttttcctgaacgatatatgcgcagacatctaagctgccctgctgatccggccgtgccagcacgacggcctgcgccgcgcccggggcttttctgagcaccgtttcaatttctcccagctcaatgcggtagccgcggactttcacctgatcatcttcacggccgatatattcgatcgtcccgtccggcagccagcgcgccatatcacccgtgcggtacatgcggccgcttccgttaaacgggtcctgcaaaaacttctctgcggtcaaatccggaagatttaaatagccgcgtcctacaccgtcacccgcgatatacagctcaccggccgtgccgtcgggctgaagccgctggtgcttatccaatatatacagacgggcgttgccgagcggttttccgatcggaacgtacgccgcctgttgattcattccgttatccgctgacatctgatgcacggacgcatctacgcacgtttctgtcggcccgtagacattcgtcagacgcggcgtcctgcccgattgatgaaagagcgtcatcagctgttcagcaacagtcgcggacagaccctctcccccaatgagcatgtggcgcaattcaattccgctgacatctcccgccgcagccatcatctgcagatgcgcaggagttccgtcagtggcttcaatccggttttgacgataatagtccagcagtgccgagccattcgttacagtcgttttcggcacgatataaagcgtctgtcccaaaagaagcgaggcaaatatctgtttgacggacgcatcaaaatgaaacggagccaaaagcgccattcttaacgtctgctcaccgcattgataaatctcctgctgcagtgattgcaccagatgatgaacttgccggtgctcaatcatcacgcctttcggccgccccgttgtacctgacgtgtagatgatgtaagccagccagtctgattgtgtgctgacaccgtccacagccgtctcatactgaacagcctcgtcaaaatcaatccgttcggcatccgctgcaggcgcctgtattccggcctccgtcagaacagccttcgctccgctgtcctccaaaatgtactgaatccgatccgccggaaagtcaggatctatcggcacataggcgccgcccgctttcaaaattcccaatattgccgcaatgacacgctcagaacggccaagcagcaccgcgacaggagaatcggctgatatcccggcttgaagaaggcgtccggcaatacggcctgactgttcatgcaatgtgcgataggacaatgttcggccttcatacacaaccgcgggtttgtcagacagtgacttcactttctcttcaaacagccccggtatcgtcatctctccgcggtaattcaccggattgccggaggcccgtttcaacagccgctctttctcggattcagaaagaagagtaagttcatcaattatgcgatcaggagatgaaatcgcatcttcaatcagcgtgatcaaacgttcagaaacagattcaatctcttcccccttgaaaatgtcgctgcgatagtcaaaatcaattgtcaatttcccggtgtcccatcgttccttcacatgaattgaaatatcatttgtaccgcttccgctgaaaatagggtctgtcaggaaggacagattctcttttttctgccactgcatcacctggtactccagagccaccgtaaacaatctgctcagcgaacttttcgaagcgcgcaaatcattgacaagcaggttatacggatacttttggtggcggagaattttcatcagatccttcatccggcctttaacgaattccaagaacgactgtcctccgtcaacgcttgtccgcacaggcaccgtagatacgaacatcccgagcatctgcttttctttcgcattcgtccggttccccataaacgtacccgtgacaacgtcatcccggccggtcactttgtagagataagtgatcagagctgactggaacagagatagtacgctgactttatgctcctcgcagaatgaatgaatgcggccatataagtcgtgaggaatttcttgagaaaaccgttttgcatcaagacccgcatctgcctggctccgtttcagggacacaagctccggcacggtctcaaactgcccgttccaaaaatcccgatcctttttaaaccgcttcgactgcacatattcctgctctgtcagcacgtgctcgataaaagaaggaatctccgtttgttcctcacttgctccgcctgagagctccaaataaatatcggtaatcgcattgcccagaatcgtcatggaaatcccgtctgaaataatgtgatgcacattagcgtaaaaccagacctcattttcactgatcgtgtgcacggaaaaacggaataaatcctgatcatataacgccagaggcttgccagcttcttcacgcccccatttggacagctcgtccgcagagcagccggcttgcctgatatctgtgtgcccgatagagagcggacggtattcgctcacatattgaacgggctccccctcatcatcaagccgcagccggattctcatcgactcataccgccggacgaattcctgtatcgctttctcaacgtaatgagcctgtacgccgtcttcagaaatgagtttcccgaacccggcaagatttgaaatacttgtgttcggatagaatttttctgtataccagatacgtttttgagcatttgttaaaggataaaaagttatttccatatgtgtgcgcctcccctttttaagataaagatgtcaattctcccttagaaacagcctccctctatgtccctaactcattctcaagccaaaagaaccacttacctccaaaaacgatcccgattcaatcaccgccgaaatccgtcatccgttcacccgcgcagtccgaaatgcggcatcaaatttatgagaaatcaagacaaaaagccattgattgtaagcacgaaaggtttacctatttctgcatgtatttctatatatctacttacgttcactttatatgaaaatattgtttttatcaccgaaaaatgggtgaaaagtttcatgcggcacaccgaaaaaaattccgacaaatccagagggtattttgcggcatcccgcaatttattttcaaaaatattatttacgtaaaattaaaaatctttaaactataatgaaaatctgtcgaatatccagttatggcagaatgaaaaaaatttacgtacgtaagctgacccggaaaaaaaagcgcaagaaccgaaacagacagtccgaatgttcgcaatatgatttcattaaaccgcaaaaaaagcactctattttacatagagcacttcaaaaagattcctttattgcagttttatcaatgttgattaattccatataatcttttccccacttatacatggcgtccagaatcggcataaggctttctccttgcgccgttaaagaatactccactttcggagggacgacagggtaaacttccctgtgaacgatcagatcctgctccagctccctgagctgattcacaagaattttgtgcgtaatatccggaattaaagctttcagctcattaaaccgcttcgtcccttcttttcccaagtgccacataatcagcattttccacttcccgcctatcacggcaagcgtcaattccttttcgcaattaaacgttttctcatccattcggctcacggacaatgctccttcctcttactttttgtacggtcatcatctattcatacacgcttactttttcacacaactttcatcagtttatactaccacgcagttttgctgaaacaaagcgcattgcctgcggggacagtatcctcaaagtaactattagacttcaaagtgcgtacttctcaacatgcggggcactctatagaatggaaatacataaaaaagaggagtggatataaagtggaattacagctggcattagacttagtaaatatcccggaagcaattgaacttgtgaaagaggtcgaaccatatatagatgttgtagaaatcggcactcccgttgtcattaatgaaggactgaaagccgtgcaggaaatgaaaacagcctttcctcacttgaaagtgcttgccgatcttaaaatcatggatgcaggcggttacgagattatgaaagcggcagaagcgggagccgacatcatcaccgttttaggagcgacagacgactcaacgatcaaaggggcggttgccgaagcaaaaaaacagcagaaaaaaatcctcgtcgacatgattaacgtaaaaaaccttgaaacacgggcaaaagaaattgaccagctcggtgttgattatatttgtgttcacacaggttatgatcttcaagcagaaggaaaaaattcatttgaggaactgacggcgattaaaaaagcggtcaagagcgctaaaaccgcaattgccgggggcattaaacttgatacgcttcctgaagccatcaaacaaaacccagatttaatcattgtcggcggaggcattacgggagctgacaataaagcggatgctgctgctaaaatgaaacagctgatcacacaaggatcatgaaaacgactgaatacttacatgaaatactaaatgaaatatcccgcaccgcagcattaatatccgacagtgaagctgacaagcttgcgaatcagattttatcggcagatcaaatcttcacgtccggagcgggacgttccggctttatggctaaagcgttcgccatgaggatgatgcacatcggtctgaacgcttacatcgtcggtgagacgcttactcctcccctccaagaaggcggtctcgtcatcatcggctcaggctcaggcgaaacaaaaagtctgcttcatacagctgaaaaagccaaaagccttaacggcatcatcactgcattaacgattaaccccgactcaagtctcggcaaacttgcggatcttacaataacgattcccggctctcctaaggaagagaccggcggagacagaaagacgattcagccgatgggttctttattcgaacaaactcttctgctgttttacgatgcggttattctaaaaatcatggagaaaaaagaattgaattcagcagacatgtttacaaagcatgcgaatctggaatgatttgctgacggccttcttatcagatggccgtctttttatcgtcttgttgcgcacggtcatgcagaccaaggttttcgggtcggacactcgcagacgaagatatcctgccggtgagcttatcgctataataagtcaattgacgatacacccgcaaccgttcatttctgaatagggaaactgcaaaaaacactttctgattgaatttttaatgaataaagttgatttgtgcggatggttttacagatattcagctgaattgcggctgagaaatatattttaacagctttacagccggccgattctgctttattcttggaccagctttacagcaattaaaactggaggtgattgatactcttgaaaacattaaaagcactgctgcttgttcttatcatcattgccggagcagtcgcggccctgatcaagggtgatcttttctcagataacgagcagaccgttcagaagagtcattacgacaaagtaatcttatttccgtccgatcgatatccggaaacagcaaagcatattaaggacgcgataaaagaaggacattccagcatatgcaccattgacagagacggagtacataagcggcgtgagcaatctcttaaacatgtgcccgtcaaaacgggatacgatagagatgaatggccgatggcggtttgtaaacagggcggaaataatgcctccgtagaatatatttctccggcagacaaccgcggagccggctcttgggtcggacaccagcttaccaatgatcccgacggaacgagagtattatttaaaatcaagtaaaaaacaggaggaacagcgcattgaataaatcatggaaaccgcaagaactggccatttcttatcatcaatttacaatcttccaaaaagattcagaaccgcctgttatcgattggaccgatgaagccattgaaaaaggatatgcggaagctgacggagctgtttcatttgaggcaaggagaaatacgagggcatttatcgtcctcaggcttaacacaagtgaaccggtaccatcctatgagaaaaaagcgactgttccctttgaggctgtaaaagatggaattgagattgaaagcgtgatgtcaaagcggctttcttttaatattccgaaaggccgatacagccttacctgttattcagtgcctgccgaattatccgatcttcatgcggatacgtatattattgatgcagccgcaatgtaaaagaaatccctgagagaatcttatttctctcagggaacttttataaacttttaccgtttgtttcaattacattctggtaccaataaaaactttttttcctgatccgtttcaaatccttttcatcttcttcatctcgattgatatagacaaaaccgtagcgtttttgatagccgttcagccagcttaacagatccgtgaatgaccagctgcagtagccgatgagatgaactccgtcactaatggcctctctgcactgttcaagatgggagcgtaaatagtcaattctgtagtcatcctgaattgagccgtcttcttctattttatcgaattcccccagcccgttttctgttataaaaaccggcagctcatagcggctcgttatacgccggaggccgatgcgcagacctatcgggtcaatcgtccaatcccaattactcgtcacgaggttcggattctttttcgttttaaacagacccggtataccggtatcctggtttgtccctttctgaccagtcgtgttcattttcccctccgatacaccatcaagaggatttctttcgtacgtaatcgtctgataataattaacaccgataaaatccggcttgccttttgcaagcaattccatatccccggcttcaatggcgggcgcccagcccttttcctttaaataattgaaaggaatttgcggataagtcccccggcaatacatatcaagccaccaatggttcataaattcctctgcgttttcaaatgcagttatgtcttcagggtgacttgtaagcggataagccggtgaataagcgaagctcgggccgatcatgccgccaggaacatattgtctgaaggattcaatcgctttggcattagctaaaaatgcgatatgattggcttcataaaatcgttttctgtcctttacgccgggcggatgtgcagctgtaataaacccgttatgaaaattataattctgctcatttaacgtgacccagtatttcaccttgccggcgaatcttttgtataacgcaatgcagtaattattaaaatcatcaataatttttcttgattcaaagccgccgtattcatccatcagcgcctgaggcaagtcccaatgataaagagtcagcaccggctcaatatcgttagaaatcaattcatcgatcaggtcttcgtaaaatgcgatccctgattcgttgatttcccctctgccattcggaaaaattctcggccagctgacagaaaagcggtaagctttcaaacccatttctgccatcaaggcgatatcttctttataacgctcataatggccgactgctgtatcgccatttgagcctttaaacgttttacccggtattttcgtgaataagtcccatactgaaggtcctttaccgtctttattccaggctccttcaacctgataggcagccgaggctgacccccatagaaatgtatcagggaacaggccctgttttttatgtatcatgtgtctcatcctcctgatgcgtatgatattgatatcatacgttatgaaacgcgtttcagagcaatcccgataaaaacaaaaaagcatccggcttgccggatgcttaagaatgatgatgccgcttttccaatttatgaggcggaggcttcgggacaaacccattttgtttcatcatgttaaagcgcctgtccatatgctgtttaatatgttctgctttttctttcggcaggaccccgtactcaacatatttggatatgacatgttttcgtttttcgagcacttctttttcaagtgattcaatttcttttttctgctgttccgtgagtgacatggttgaaggcatttttgttccggcggcgtgtgccggcattgtgaaaaccattgctgtaatgaaaaacgcagctaaagacaatgcagcttttttcatgactctttcctcctttaacgtttgttatatgttgctccctcatccattttttatgcaaaaaaagagcgaaattattcgctcttttcaatcgattcgtccggcagcgcgtatgtgacatacgttcccgctacaaaatcgtggattgaccgtctgtcttctctcattccgaccatgaatgcgctcacgatcacaccgattccaaacgtcacgccatatatcaggccgcccacaagcactctcaaaatcatagtgaggaagcctacctgagtgccgtcttttttgacgatgcggataccgcagatctttttgccgataacataaccgttccagtatacagggagcaaaatagcataaagagtcaaaatgatgctgatcattgtgctctcattcggatcttttcctgttgccagcataaaaataatcgccaaaggcactgaagtaattaaatagtcgagtaccacggctcccaatctgatccaaaatcccgccggtctgtaaatattcatcgtgtttctcctcgctatggctttaaaatcactttaatgttgccatcttcttttttgtcaaatatatcatatgcagcaggagcttccgcaagactcattttgtgtgtaatgatatccgtcggatcaatttcattttgttcgatcatttgatacagcatcggcatcagatgaataacgggtgcctggcccatttttaaagaaacgttgcgtgtgaaaaaatcaccgagcggaaagccgtccgcttcagaaatgtatgcgcccgtgagctgcacggttccgaacttcttaacggcttctgatgctgtaagaatcggactgatcgttccgaactgattcggtttttgctctgttttttcttttgaaagcggcgtgccgtccattccgacacaatcaatcactacatccgcgccccctgacgtttgttcatgcagcagtttcccgatctcatcatgttctgaaaaattgaaggtctctgctccgtttatgcgtctcgcatgttcaaggcggtgcgggacttgatcaactgcgataacccggttagctccttttttccacgcgaatttttgcgccattaagccgatcggacctgatcccagaatcacgactgtatctccttttttcactccgctgtgctggacgctccaaaaggcggtcggcatgacatctgacagaagcagcacctgctcatcttcaagctcactgtctgccggaaccagaaaagaagagaaatcagcataaggaacacgtaaatattcagcctgcccgccgggataattaccgttaaactccgaaaaaccgaataagccgccggcatctgtatgaggatttggattagattcatcacactggctttccatctggtgcttgcaataatgacattctccgcagccgatgttaaaaggaatcacgacccggtcgccttttttcagctttttgacttgactgcccgtttcttcaacgattcccatcggctcatgcccgacgatataacccggatcggcgggtattccgtttttatataaatgaaggtctgaaccgcatatcccggttgcggtgattcgaacgatgacatctctctcatcttgaatggcgggtgccgggacttctttcacttccatatgttcttttccttggtatgtcagtgctttcacacttggtcagctcctttttcatcactccttcccttttcacctgcttctaaacttggccggtatgttattcggcccgctgaatatcccattgaaaaggttcttcaagctgcgaccagtcggaatcgaactcagacggcgtgagcaggcactgatccaattcctttgtaatggctgcttcatctaaatctgttccgataaacaccaggttcgtatgacggtctccgaattggtcgtcccaatcttccagaatctccggttcctgctgtttgatctgctcctgctcaagtttcggcattgccgccacccaataagaaacaggctcaatcgaaaccgccggacccgcctgagacatcagcagcgcaaggctgttgcgggttgcgcaccaaacaattccttttgcgcgcacaatgctgtcaggcattgattgatgcagccagctatcaaaacgagcggtatgaaacggcagacgccgcgagtacacaaacgaagtgatgccgtactcttccgtttccggagtgtgcgcttcatgacctgccgtcagctcctttatccatcctgctgatgaactcgcttcctcaaactcaaataaaccggtattcaatatgcattcggcaggcacttctccgcggacggaccggatcagtctggcgcggggctgtaatgcgcgaaggaccgtttccagctgttcaagctctttttcgcccaccatgtcgcatttatttaaaatgagtacatcacaaaactcgatttggtcaattaataaatcggcaatcacccgttcatcctcttctcctaccgcttccttccggtcaagaaggctgtcaccggactggaaatcatgccagaagcggtttgcatccaccacggtcaccattgtgtccagcctgcagaatgttgtcagatcaatgcccatttcttcatctatataagaaaatgtctgggcaacgggaatcggttcgctgatccctgttgattcaatcacaatataatcaaatctgccgtctttcgcgagtttctcaacttcgactaataaatcttcacgcagcgtgcagcagatacagccgttggataattctacgagtttctcatccgtccttgacaagccgcctccctgcttcaccaagcccgcgtctatatttacttcgctcatgtcattgacgatgacggcaatttttaaaccgttgcggttttgtaaaatatgattcaaaacggtcgtctttccggcaccaagatagccgctcaatactgtaaccggaatttttttcataaaatagcctcctgacaaaatagaatgattacgatttataccccgcacctgccttattatcatcatgatgtacattattataaatcgtaatcgttactatttattctgatgtattctccgtttaaaatcaagtgaaaaataatcaatcataaaaaagacacgctgtcatacgtgtcttccgcccaaacttaaacatccgcaggactgttttcagtgccacagctttttctccaaaaatagcctgcggccagaacaagcacaaatgcgagcaatgtgatacatgagaaagagataaaaccgatcgcataagttcccgtcatctgcttcaatgatcctaaaatattcggaaggaaaaaaccccctatgccgccggctgctccgacgattcccgtcaccattccgatttcttttgcaaagtgctgagggacaagctgaaataccgctccgttgcccataccgagcgccatcattccgataaacagcagaacgatcaccgttgaaagcggaggcaggctgctgactcccgccatacacagagccgcgatgacaaacagtacagccagaactttcgcacctcccgcccggtctgaaatccagcctcctgcagggcgaaaaaaactgcccgctgcgacacatattgtgacgaaatcaccggcatggatttttgacaattgatattgatcaacgaaaaaaatcgccaaaaaacttgataatcccacaaaacctccgaaagtgacgccgtacagaagacagaaacaccatgtttccttctgcctgaacacgtgaaggtagtttttaagcggctgcggtgcgggctgtgcaggagagtccttcgccatgacgataaacagtataaaaacgatcatcaacggaagaagcgcaattcccattacactgtgccacccaaactgttccgcaaggcggggaccgaacaatgtcgcaaacaaagtgccgctgttgccggcacctgctatccccattgcaagcccctgcaagtgaggcggataccaccggctcgccatcggaagcgcaacagcaaaacttgcgcccgctacgcccagcagaatgccgatcgcatacagctcagtcaaagaacggccgccgaatgccccccaaagcagcgggatcatcgtgatcagcatcccgatcacggctgttttcttcggcccgatcctgtccgttaacacacctaaaatgatccgaaacacagatcctgataagatcggcagagccacgacaaaccctttttcaaaagaagataacccgaaatcctgagaaatataaacgccgagcgcccccagcattacccaaatcataaaactcacatcaaaatataagaaggaacagagcagagtgagcggatgaccgcttgtttttaattccgacagcttcataacattctcctttccggtcttctatcatttcaaattgctgaatcaagaatatatgacgggcattcaccggaaaagacatgtgtaagataatgcgacacatttaatgcgttaatcaggcaatgtgccataatttctcatagagaagcaatcttactggcagctgcaaaggaggtttggcgaatgaagaaacaacgattaattgcagcagggaacggaatggccggaatccgctgtattgaacacattttaaagatgaaccgtgacatgtttgagattgtcattttcggaagcgaacctcatcccaattacaatcgcattctcttatcctccgttttacaaggtgaggtttcgcttgatgacattacgctgaatagccgcgaatggtacgaaaaaaacggaattacgctttacacgggagaaacggttgtacacattgatacagaacggcaggttgtcacaacggatcgaaagcgcagcatgacttacgatcaaatcatccttgcaacgggctcctctccttatattctccccatacccggagcagataaagaaggtgtgtacggctttcggacaatagaagactgccaatcccttatcaatgcggccggccggtatcaaaaggcggcggtcatcggcgccggtttattaggtcttgaagcggccgtcggcttacggcagctcggcatggacgtcagcgtcattcaccactcttccgccattatgcaaaaacagcttgatccaacggcatcccgcctgctgcagaaagagctggaacgaaaaggcttagtctttcttttagagaaagacacggcatccattacagggaactcacgggcggaaggcatccgtttcaaagacggttcttccatagaagcagacctgattgtcatggccgccggtgtgaggcccaatatccgatcggctgcatctgccggactttcagtgaaccgaggaatcatcgtcaatcaattcatgcagacgaacaaaccgaatgtgtatgccgtcggtgaatgcgcggagcatgacgggattgtatacggattggcggcgccgctttatgaacagggaaaagtgctcgcgcagcatctatgcggcgtcccgtgcgaagggtttcaaggctttgcacaatctgcagccttaaaaatagccggtattgatgtatggtcggcaggaaaggtgcacgaggatgagcacacagccggcatattgttccatgatgagcatgcaggcatctacaaaaaagcgctctttgaggacgataaaccggccggctttattttattcggggacacgcgcggtaaacagcggcttctcgacagtcttgtgaagcaaagagatatttccatcgtgaaaaaacagctcatggaaccggatcaaggcggtatatcctttgaatccatgcctccccatgaaaccatttgccaatgcagctcagtgaccaagggctccattgaagaagcggtgaacaaatatggcttaaaaaccgcggaggaagtgaagcacatgacaaaagcgtccggatcttgcggaggatgcaggccgctcgttgaagacttgctgaagtatatggcaagcgatgattacacaaaaccctcccgccagccttcgttttgcggctgcaccgatttgacggaagaagaagtcatcgccgaaattcgccgccgtccgttcactgatgccgccgaggtaatgagagagatcggctggaaaacagaaaacggctgccgcatttgtattccggcgcttcactattacttggaaaggacgcggcctgattttatgcagttcaatgaaatatcggcagaagagacatgcaccctgattccgcaaatgtacggcggactgacaagtgcggcagagctcaaaaacatcgcagacgtcatcgaagcatacggcatccccgaggtttcgatgactgacagtcaccggctgaggctttccggaataaggccaaatgaccttgcaagcatcagaaaagcactgaacatgccggttttctccccccggcaccgctggacgatgcaaatcaaagcatgtacgtgcggacagcatcgctcctttcaagagctggcaagcaggattgaacgagataccgacacgcttgccgtacccgcttatgtatccgtcagcttgtcatgtgaaaacaattgcaccgatgcttacattcaggatatcggcgcgcttcagacacaaacttgctgggagatttatatcgggggcgtccgcggaaaacaagcccgcgccggcagccttttttgtgtgacggataacgaagacagtaccgccgctatgatgaaaggccttattcaatattatcgcgaaacggctcactacaacgaagcgatttatcaatgggttgacagactcggcctcgtccatatcagagaaatgctgtttgaagaagatatgcggacacagcttctgaaaaatctccgttcagacatatccctgctgcaaaacctgtctgccgggaaaacgccatacgaaaggatgaagctttttgactgaaccgatgctccgttatttccgtgacaaactgcaagatattcaatcggaaaaaacatatgagacgcaatgcccgttctgcagcatgcaatgcaaaatgcagcttacggaacaaaccttcgcggcacggaagaaatacactgcaatcggcattgataatccgacgacacatggccgtttatgtacaaaaggcatgaatgcccatcagcatgccgtgcactcttcccgcattacacgccccctgcttaaaaaaaacggtgaatttgtgcctgtctcttgggctgaagcactgaatcgcataaaggaacaaatcaatctgatccaaaccgaacacggcaatgatgcgatggccgtctacgggagcgcctcaattacaaatgaagaagcctatctgcttggaaagttcgcacgggtcggcttacagacgaaatacatcgattacaacgggcggctctgtatgtctgccgcagcaacggcggccggccagacattcggcgcggacaggggcctgacaaatccattatcggacattccgcatacacgtgtcatcatcctggcaggcaccaatatcgcggaatgccagccgacaatcatgccatattttgataaagcgaaagaaaacggggcttacattatcgccattgatccccgggaaacggcgacgaccaaaatagccgatcttcacctgaaaatcaagcccggtacagacgccgccttggcaaacggactcgtcaaaatctgcattgacgaacagcttacagacaaagactttatccgcacacgaacaaacggattcgataagctcaaacggcataccgacgctttggatctgaaagagatctccgagcagacaagtgttcctttggagcatatacgaaaggccgccgtgaagtttgccaaggaaacatccggcatgctgtttacagcgcgggggatcgaacagcagactgacggtaccgcggcagtgaaagctttcttaaatatagtgctgatcacgggaaaaatcggcaagcccttctcaggttacggggcgattaccggtcaaggcaacggacaaggcgcgagagaacacggccaaaaagcggatcagcttccgggctaccgttctatcgaaattgaagaacaccgggcgcatattacgaaggtgtgggggattcatcaggatgagctgccgcgaaaaggcgtctcagcctatgaaatgatagaaaaaatagatagcggcgacatcaaaggactgtttctcatgtgttccaatccggctgtttccggcccaaatgcgaatttcgtcaagcaggcaatcaagaaactgagattttttgtcgcagttgacttatttatttctgagaccgcggcattcgcggatgtgattttacccgcctcctcttatttggaagacgaaggcacgatgacaaatgtagaaggccgcgtgacattaagagaagcgagccgcacctgccccggagaagcgaaacatgattggcagatcatctgtgacattgcctccgctcttggtaaagggcattatttttcctatacgtcggcggaggaaatctttaacgaactgagagaagcgagccgcggcggaatcgctgattacgcaggcatcacctatgacaggctcaggcgggaaggcggcattcagtggccatgtcctgaagcggatcaccccggaaccgggcgattgtttgagcactcatttgcccatcccgatcacagagctgaattaagcgtgattccaaatgaaccggccgtcccgaaagagaaaccgagcgccggctatccgctttatttaaccacaggaagggtgatgtctcattacttaacgggtgtccaaacgagaaaaagctccgccctggctgcaagacatttcgaatcctttgtggaaatccatccaaaaacggcggccgactatcatatcgaagaccgtgttctcgtgaaagtagaatccccccggggcagcatcacggtccggagcagatggtcggagaaagtacgaaaagacacgttgtttgttcccatccattggtctgacacgcaaaacgtcaacgacttaattggtgaagccttggatccggactgtaaaatgcccggttttaagatgtgtgcggtacgaatcagccctatataatttttcataaaatttttagattttttagtattttttgttacatttcataacatgcatcttaaatatttgtttttgctgtgctacgctaaaaaaaaacaaagataaggagcggatcatctgatgggaaaaaaacagctagtccttgttggaaatggaatggccggggtaagagcgattgaagaaatactgcgtgtttcaaaagacgaattcgagattacaatattcggggccgaacctcatcccaactataaccgaatccttctgtcaaaagtgctgcaaggcgataccgacattcaagacattacgttaaacgattggaactggtacaaagaaaacaacattcagctgtataccggtgaaacagtcatcaaagtcgacacggaaaacaaaaccgtcatcaccgatgcagacagaatccagccttacgatgaactcatcctggcgacaggctctgtcccttttatccttccgattccgggcgcagacaaacaaggcgtcacggcattccgggatataaaagatacagacacgatgctcgccgcgtcaaaacaatataaaaaagcagccgtcatcggcggaggactgcttggtttggaagccgcacgcggactgctgaatctcggaatggacgtgtctgtcatccacctcgccccattcctgatggagcgccagcttgacgcagcggcgggacgcctgctgcaaaacgaattagaaaaacaaggcatgacctttttccttgaaaagcaaaccgaagaaattctcggtactgaccgtgtcgaaggcgtacgcttcaaagacggcacaagcatcgaagctgacctggtcgtcatggcggtcggcatccgcccgaatacacagcttggcacagaaagcggcattccggtaaaccgcggaatcattgtcaacgattatatgcagactgacattccgcacatttacgcggtcggtgaatgtgccgagcaccgcggaatcgcatacggtcttgtggcgccgctctatgaacaggcaaaagtgctggccaaacatatttgcggcattgaaacaaaaccgtatgaaggctccgttctctccactcaattaaaggtatcaggcgtcgaagtcttctctgccggtgactttaacgaatcagaggacaaaaaagcgattaaagtgttcgatgagcaggacggcatttataaaaaaatcgtcctgaggggcaatcaaattgtcggcgctgttttgttcggcgacagcagcgagggcggccgcctgttttctatgattcaaaaagaagccgatatctccgaaacttccaaaatatcaatcttacagcctcttgatcaggaagcaggcgcaagcatgaccgcggcgatgagcgacgatgaaatcatctgcggatgcaacggcgtttcaaaaggcgcgattattcaagccattcaggaaaaaggctgcacatctacggacgaaatcaaagcatgcaccggggcatcccgttcctgcggaggctgtaaaccgctcgtggaagacattcttcaatatacactgggctcagaatttgacgcgtccgcgcaaaaagaagcgatttgcggctgcacatcactgtcgagagatgaagtcgtagaagaaatcaaagccaaagggctgtcccatacaagagaaatcatgaacgtgctcggctggaaaacgccggagggctgctccaaatgccgtcctgccctcaactactacttaggcatgattaatccggctacatacgaggatgacagaacatcccgttttgtgaacgaacggatgcacgccaatattcaaaaagacggaacatactcagtcgttccccggatgtacggcggcgtgaccaactctcaggatctccgcaagatcgccgatgtcgtcgacaaatatgagatcccgctcgttaaaatgacaggcggccagcgaattgatctcatcggcgtcaaaaaagaagacctgccgaaagtatgggccgagcttgatatgccttcaggctacgcgtacggaaaaacactccgcacggtaaaaacgtgcgtaggcgaacaattctgccgcttcggcacgcaagactccatggcactgggcattgcgcttgagaaaaaattcgaagggctcaatacgcctcataaggtcaaaatggccgtgtccgcctgcccgcggaactgtgcggaatcaggtattaaagaccttggcgttgtcggcatcgacggaggctgggagctttatgtcggcggaaacggcggaacccatttgcgcgccggtgatttgctgatgaaagtaaaaacgaatgaagaagtcttagaatatgcgggtgcttaccttcagtactacagagaaacggcaaactatctggagcggacatccgcatggcttgagcgcgtcggtttatctcatgtccaatccgtattaaacgatccggaaaaacggcaggagctcaacgacagaatgaatgagacactctctgtccacaaagatccgtggcaatacttccttaaagataaaaaagcatctaaagatctattcgaaaatgtcgtcacgacttcataaaacagtaagggggaacggacatggttaataaagatatgacaaaggtttgcataggcaaagtaaacgaattacccgaggagttaggaaaaaccgtatatatagaagataaagagcttgccgtatttaaactttctgacgggagcgtccgcgccgtcgaaaaccgctgtccccataaagggggcgtcttggctgaaggcatcgtcagcggagaatacgtcttctgcccgatgcatgactggaaaatctccttagaagacggaaaagtccaagagccggatcatggctgtgtcaaaacatacgaaacactgatcgaaggagagaatgtatacctcctgtattgatcagaccggatcactttttcaagtggtccttcattttttaaactgctgaagggatgacgccatcatgaaaaacggaatcgtatattttgtcggtgccggaccaggagacccggggctgatcaccgtaaaaggaaaacaggctctggagaaagcggatattattttgtatgaccggctcgcaaacccaaagtttcttgagtatgcctcaccggactgccggttcatttattgcggaaagctgcccgaccgccattttatgaaacagtctgagataaatgccctgctgattgaaaaagcggcggagggctgcaccgtagtccgcttgaaaggcggagacccaagtgtgttcggcagagtcggcgaagaagcagaggcgcttcatcagcacggcatccgctacgaaatggtgcccggcatcacctcgggaatcgcagcgccgctgtatgcgggagtccccgtcacccatcgtgatttcgcttcgtccttcgcgatgatcaccgctcatgatacatcattgcacggcaggccgaatctcgactgggaagggcttgcccgaagcgttcaaacgcttgtgttttacatgggcgttaaaaatctgtcatttatatgccgtaagcttacggagtacggaaaatccccttccgttcccgtactcgtcattcaatgggggacgtgggggcggcagcggagtgttaaaggaacgcttcaggatatccatgaaaaagttcaaagccaaaacatcaccaaccctgccattatcgtcatcggtgatattgtcaattttcaaacacacagctggtttgaaagcaaaccgttcatcgggcggcatatcatggttgtcactcatggcgatgaagaacacacattgacagacaagctgcgcgaatatggcgccgatgttattgaatggccgaagcggatcgttaaaaaaatgcccgcaaacgaaaacatcctgaaacagatcagcacctttgaacaactatttttcacatcacgccttgcggtatgcgaattctttgacacactggctttcaagcagatcgacatccgccgggtgaccgcaagcctgaatgcagcgactgaggccgcaaagacggaactgacaaaacggggctttctcctatccgaatgtcaaattgattctccgcattcactcattgtaggaagccgtcaagcagcagaaaacttgtcagactcaaaatcatgcccgttttatatcacccatgaacatatcgcagatgagcggttcacttccatgatcgaacgcacgatcagcgagtctcctctgcaaatgattatctgtacgggcaaagaatccgctcagcatttgatcagcgccggaaaacaaatcggcatatcaccgaatccgtcaggaaaccgccctcccgtcatctgcatgggcgaagacgtccccgccggctgcgggtttaccgccgtgaaaaatcaggaacagttatttgcgtttatacgaaatgaaatgaaagacatgctcgttcacagctgatacgccggaatttctgacccccgggctcaatatcgggggtcagcccttttttattgtgtcaccaattttttatggtgagtcgaatacatcgccatctgttccgcctgcgggtccaaataggctttggcgctgttcacggcggtcggcccctccgtgaaaccgccggcaatcaatctgagcttgctttcataatgggcggcgtcaccggcgacaaacacgcccggaagattcgtccgcatatgtctgtcagctttaatcctgccttcttctatctcaagcccccagtccttcatcggaccgagatcaattttaaacccatggttgataatgagctcatcaagcttgatgacttcagaaagtccggactcagtttggcaaacggtgacgctctcgatccgttctccggtgccgttgaggtgctttagacgatatggcgcaagcacccgcacggaagaccgcttcattttcgccacgctgctttccaaaccgccgaactcctccctgcggtgcaagacggtaacagacgccgcaatcggttccagctcattcgcccagtcaaccgcggtatctccccctcctgaaatcacgacatgcttatctcgaaacgcatcaagcttctccaccttataatgaaggttctttcccgaataccggctcgcatccgcgctgtcaagttcattgacctcaagcgtccccatgccgacagccaaaatcaccgtgcgcgtatagtgcttttcccctttggaactttccagcacaatggttccgtcttccagccattcaaatccggtcacccgctgattcaacacgatatccggcttaaatgtcgcagcctgttccttcagctgcttaatcagctgttctccggcaatcccgggtattccgccgatatcacggatgattttttcagggaaaaacatagacactttccctccgagccgcggcaaaaactcgatcactttcgttttcagctcgcgcatcccgcaataaaaagccgcaaacaggccgatcgggcctccgcctataatcgtgacgtcatacacctcatgattttccgccatcgttctgcctcccgtttatatctatacttcaaacatttttaattgagaatcaatatcaatgaaagtataacacatattgaggagaagtgtttattcatttctctcttgcggaaaaggagtgattcagaagtgaggttctgagattgataagcgggaaggtattaaaactgaaaccagtacggcgactggtttcttttttatctctttttcatcagcatgatatcgagatacagctggcaccttgtcctgaagtcgtttaaattaattgatgtcatgtcaagaatctgtttgatacggtagttcaatgtgttttgatgaataaaaagctgttctgcggctggttttgttttgcagttattgaggagatagatttctaacgttttcagcagttcggtactgctttctctgtctttggcttttaataacgctaaatcttcgtttacatattccagtgaggcgtttttttcttcgatgctttcaagatagcggtaaatcccgagcttactgtattcgtacgggatattttcctggtttccggtaatttcggcggcctttatgacttcaagggcctctatataacttttgccgagcttcaggatgctgctgtattcattgccgattccgatatagatgggagtggggatcttctgaaagtgaaaatgagtcagcagtttgtgggtgaattcagatgctgccgaagtgccggagcttttttgcgagaagcttgcgacgacgatgacaatattggaatcaatggttaagacgtgactgactttatcccgcaaattcaagtacgatttgatattttccttcacatcttcgactgcctccccatccccattcgcggcgtgcaggacgactactgaaaaaaccgacggcagcacggcgttcatcttttccgcttcccgcctgaactccttttcagaggagaattgctgaaagatcgcccgtttcaccaggtcttccgctctctcttctttttcctgtttcagccggttcgttttatagatgatttttccgacatggaatgaagtttcatataaaaaatcgagctcctcgtccgtcaagtttcggtcgagctcctgaatccagatgtagcccatcacttcgcctttatgttttgcgcttacaaccactctctgattcagtccgatactgtctattttttcgacacggaacggttcaggaacggttttcagcttttcgatcaccccgtccttcagaaacctttcaaaaatctgcacggggcatttttttgaaaatatcgtctgctggttggcggagtcgaagtgattaatgtaataagaattataggcaagcaaaaagaaatccgcgctttccagaataacgggcttctgcaattcataactgatgaaatcaattaatttatcaatgtccgtaaatgaaaaaactctctctaaaagctcttccatacctatttctcctatgctctttttatctttatcatactctgcggggtgactttttgtatagaaaaaaattcacataatcccaaaacggcatgatccggaattctgtatcgtgaaaagaggaaaaagggcggtcccttcttcctctcgttccttgcttttattgagaaagtgtatcacggtactcatgaaactgatctgtgacatcttttgacggagcctgtgtcaataagctgacgacaaatacagcggcaaggcttacagcaaagcccggaatgatttcgtacaaaaagtctgaaagaccggcattcgcccaaatgattacggtaatcgctcccgcaatcatgccggcgagtgccccccatttcgtcatccgtttccaaaataaactgagcagtacgaccggcccgaatgaagcgccgaatcccgcccatgcatagctgacaagaccaagtatcgtgttgtttttctcccaggcgagcaccaaagcgatgattgacaccgcaagcactgccattctccccagaaatacgagttccttatcagaagctgaacgcctgaacatggacttatacaagtcctccactaaagaactggacgtaacgagcagctgagacgaaatcgtactcataatggccgctaaaatcgcagaaatgagaaatcccgtaataatcgggtggaacagaatgttgccgagctgaataaaaatggtttccggatcagccagcttcagtccgttctggtggtaatacgcgattcccgcaagacccgtaaacagcgcgcctagtgcagacaaaatcatccatcccattccgatccgtctggcacgtttgatttctttcacagacgtgatcgccataaagcgcacaataatatgcggctgcccgaaatagccgagcccccacgcaaataaagaaataatgccaaggacggtcgtccctttgaacatgttaaacagttccgggttgacggaacggatatcggcaacggtttcccccgggccgcccgtatggaaaatcgtcacaatcggcacaagaataagcgccacaaacataatgatcccttgaacaaagtccgtccagcttaccgccaaaaagcccccgaacaaggtgtaggcgacaacgacgcctgtcacgacccacagtcccgtgtggtaattcaaccctaaaatgctgttgaataagacacctccggataccatgccggatgatacgtaaaatgtgaaaaagacgagaatgacaagacccgaaaacagtctgagaagcttcgtatgatcaccgaaacggttttcaaggaaacccggaatggtgatggaattccccgctttttcggtatacgttctcagtctcggcgccacgaaaagccagttcgcccacgccccgagcacaagcccgagcacaatccaagcgccgcttaatcctgtcgagaacatagcacccggaagccccatcaagagccatccgctcatatccgccgctcccgcgctgagcgctgtgacggcagggcctaaagaacgccccccgagcatgtaatccgtcagatttgacgtccgtctgtaggcgaaataaccgataaacagcatacccgccatataaatacaaatggaaataatcaactgaatgtttgctatggcatttcctcctccgctttatatgtttatggtgaaatggacaccccccgcgaggaggatgcccattcagtccctcttaaaacatttcactgattgttttcgcctgcatgtggagggccaaataatccgggccgcccgcttttgaatcagtgccggacattttgaagcctccgaacggatggtagccgacaatcgctcccgtacaattgcggttgaagtacaggttgccgacatggaattcctgtttcgcccgttcaatatgtttgcggttatttgtaatgaccgcgcctgtcaaaccatattcagtattgttggccacttctaaagcttcatcaaagtttgacactttagaaaacgccacgacaggcccgaaaatttcttcctgcatgagtcttgctttcggatcaagatcagcgaagatcgtcggcttgataaagtagccttttgaatcatctccggtgccgccgcttactaaacggccttcttcttttccgatttcaatgtagctcatgatcttgtcgtaagaaccttggtcgatgacaggccccatataaacatctgcactgtcaggtttagcagttacttttgattccgtaatttcaatgacacgctctaatacttgatcatacactttttcatggacaactgcacgtgaacctgcagaacatttttgtcccgcgaagccgaatgctgatgtaaagatggattgagccgccaattcaatgtccgcatcttcgtcaacgacaaccgtatctttaccgcccatttctgcaatgacgcgtttcagatgctgttggcccggctgcactttcgccgcgcgttcgaaaattctcgtaccgacttcacgtgatcctgtaaatgtgataaggcttgttttcggatggtcaacaagataatcgcctacttctgctccgcttcccggcacaaagttgactacgccttttggcaatccggactcttcaagcacctcaacaaattttgctgcaataacaggtgtagcactcgcaggttttagaaccactgtgtttccagtaacgatcggcgccactgttgttcctgccatgatcgcaaacaagaagttccacggcggaataacaactgtcactccagtcggcgtgtacacatattggtttttctcgccctcacggctgttgaccggtttgccttttgccagttcgatcatttggcgtgcataatactccatgaagtcaatcgcttcagccgtatctgcatcagcttcgttccaaggttttcccgcttccttgacgagcagggcggagaattcgtgctttctgcggcggactttggcagctgcgcggaacaaaacggccgctctttcttcaggggatgtgtatctccactcttcgaacgctttcgcagcagcttcaatcgcttgctcagcgtgctcctgggacgcctttgacacttttccgacgacttcttctttatcagccggattgattgaaacgattttcgcttccgtctctaccttttcaccgttgatgacgagcggataatcttttcccagatactcatttaccgtcgcaagcgctttcttaaattcttcaacgttcgattgatcttggaaattcgtgaatggttcgtgtttataaggtgtagtcattgtcatctctcccttttttacttcttagtcatccctttaaaggcgaatgcgatgtttgaggggcgttcggcgagccgtctcatgaaatagccgtaccagtcatccccgtaaggcaggtagactctcatgcggtatccttcttccaccaggctgagctgggtttgcgagcgcatgccgtacagcatctgaaactcaaaacggtcgtttggaatgccgtgctctttggcaagctgttttgtaaactcgatcattttgtcatcatgcgtggcaactgccgtataatgtccttttaaaagctgtttgcggatgagtcttttataattttcatcgacgtcgcttttttcaggataggccaccttttccgattctttataggcccctttgacaagccgcagaaacggattcagcgggctgaggtcgtcaagatccttctccgttctgtacagataggcctgcaccacggtgcttacatattcataccggctccggaagtctttaaagatatccagcgttttctggcatctcgtttcatcttccatgtcaatcgtcaccatgactttatgtttttcagccgtctggaggattttcgtcatattttcatagacgagatcgagatctatatcaagacctaaagacgtcatttttaatgacacttgggaattcagctgttcatcagcgattaaggcgatggtctgcatgcactcctcggtgcgttctttcgcgacatcaccgctgttgacaaattcccccaaatgatcgacagtaactgacagcccctggctgttcaaatgtcggattgtcgggatagaactgcggaaatccattcctccgatgattttgccggctgccacacggcttccccagcttcgcgccatcttattgagaaagctgctcttggataaaaataagaaaaaatctcttgtaatcacttccaaccttaacaccccgcaatctaagaagtatttgtatgagtctattgtaaatggacaaaacatcctctcacaatattctaaaaatacaaagattctgataaatttttgtggttttaccacaatcagcttcttagatagcaggcggattatgccgaaaaaaggcggacggaaatgacggcaatcgtcaatttccgcctttttccccccacgcctcttcgacggtctgaatcaatagccgattcagttcctccgttatgtcaggtttcggcgttttgatcgttttgacatagtgcccgatgcgttctatttcttcttctataaatgcatgaatgatcgtatttctgggttccggagccagctcctgaccgctttttttccttgtaagcagtgtattgatttcagaaatgagcgcttcatccgtcaataaggcatcggccagtacgggaaatgacatcggcggtacggagccgaacgtttcaatccatctgcaggcaaggagaggacgcagaacataaaaatactttttaatctttacttcactgccccgcaattccgttttttcattccgttttgccatattgagataatgatagatgccggcttcaggcgaaaaggcgcggattttcagttttcgaagcttttcagccgctgagaaagcttcataatagatcatctcagaagagagccattccaaaagaggcggatttgattttttaaaaagcctaagcgcttttctcagttcccagccgctgatgtcaagcatgtcatgaatcggctcttctatgacatccctatgcggttcgatcgaaaagtaccattcttttttcggcacatagagaaaccgcacatcgtagtcgctgtcgcttgacggaaacccccatgcgcggctccctgattctacggcgtaaagcaccttgacgccgtgctgtgcttcaattcgttttaattcttcgatgatcctttgtttcatctgtatccgtccttttccgtgatcattcctgaaaaaagcccaagtacttgggcttttcgctgtcgtcagcctttcagatgcgctttcagaaaggccagcttttccgtatggaaagaaggtatgtattcatgtccgaaataccggtaaaccttcaattctttttccgtttccagatgattgtacgcggcaaataccgtcgacggcggggtcacacggtcaatcagcccgatggacatgagcaccggaacttttacgcggtccgccagattcatgatatcaaaataggccagtgtattcatcgcggccttctccgtttcagggctgccgttctttctgaaaaaggagttaatctcaagatacggctcatcaagagcgacatcaatggcccgctcaaaattgcttaaataaggataatcggccgcaaccgctctcggaatgtcagatagtgccgccgcggcgattgaaagtccgcctccctggctcccgccgatgacggcgatcctcgtttcatcaacttcatcaaagccgctgatgacttccaaagcccggacggcgtctaagtacacgccgcggtaataatatgtatctttatctaaaatccctttcgtcatccagccgggaacgtgtccgtgcggtgagacgcttgtatctgtgctgctgtgctggccgcggacaagcatgccgaacgcggcatatccgtgaagcgcccaatttacgatgtcatgtatatccccgtcatagctcgcattatagccgtgatatttcacgatggccggatgcggtccttgccggtcgggaatggcgtaccatccctcaatttccgccttgccgaagcttcggtatgtcagccggaatactttcacgccgtcagccgggtagctttcagccgtcaattcaggctttgcctcttcctttgcaagctcatgtaatgatgatgcccaaaaatccgaaaagtcatgaggagcggttttatttggtttataggtttgcagttggtcgagcggcaagtcgtataattgcatatccgattattctcctttgttttataagatttaattttctgactctatcttaacacgattttacactcattttctaaacattttaataaacgtttgtttaaaaacaaaaaagccgtgcgctcacagcgtcacggctctttttacatcggctgatacaggtcccagccgatttttaacgtttctacgatataatcggcgatttcttctggttccagattatccgtcgccacttttgaattatgtttatcatagatgctttggcgctcgttaaagagctgctgcatttcatccatggaacggttatgcagaacgggacggctttcaatcagcagatcagcccgctgcttccaattctcccatgataaatcaagatggagcacgagacagttttcaagacagcactgtctgatttcctcttgtttaaacgaaccgcccccaagcgacacgatcttgaatttcgtattacggcaaatatctaatatataatccttttcggtctgacggaaaaaggcttcacccttctgctcaaacatttcagggatggacatattgaaatctttctcaatctgcaaatcaatatcaataaagtctctgtatagtttcttagcgaccagctggccgattgttgtctttccgacacccatgaatccgatcagtacgatatttctttctcttacgggaatggcacgttttgcgttcatcttcggcgaaatcctcctaagaaatgaaaaagttatgtttattatatgataactcaatattgaaatatagagataatgcaatgaaagaaaacccatcctttataagaagagatgagtttttctttctatcggagcttaatgcgttccacctttccgacaatgaaaatataagaaaatgccccgataaatgcgacagcgccgacaaacagaatcgctccgttataagaaccggtcgcagaaacgataaacccgatgataagcggggtgataataccggccatattggcgaaaaagctaaagacgccccctgccaatccgattgtttcgcttggcgcgacctcactcagcatcgtccaggatatgttggacatgccctgcgcaaaagaagcaatggataagatcgtcaaaaccgcgggagcagaatccgtaacattcgcaagcacgatggagcctgtcagcagaagaccgaggatgacgggcgttttccgggcaacgttcaccgacaccccccgtttcatcatgccgtcagaccaatacccgccgaacaatacgccgaaaaaggcggcgatatacggaattgatgcggcgaagccgacttttaagaaagccatgtgctttgcctccgccagataagtcggaaaccatgtcaaaaagaagaacagcgtggaggctacggcgaattggccgatatacaatccgacaagcttgcggtattttagaagctggacgaaatccgcccacgatatcctgccggctgaatcagacacctcagtcagtccgccgccttctttaatataatcaagctcctcacgattcactttccgatacccgttcggctcgtgatacattttaaaccagaaaatggagaaaacaattccgagcacccctgaggaaataaatacggcgcgccagtcaaatgccgttaacacccagaataaaaccggtgtggcgaacgccagcccgacatattcccccgccgtataaacacccgtcgcaaaggcgcgttcccgccttggaaaccatgtcgtgacaatccggttgtttgccggaaacgccggcgattcagctatgccgatgagcaggcggcagccgaatagaaacccgaaacttgtcgcaaaagcttgtactccggtaaaaaccgaccacacaaataaagaaattccgtatgtccgttttgacccgaatttatccaaaatgagcccgcctggaatctgcatccccgtataggtccagctaaacgcagaaaaaacgatgcccaaaagcgcggggcttatgttcagcgaatgttgaatggatgggccgacaatagatacactggctcggtctatataattaatcgcagtgataaaaaacaaaagaaccaatatcacataacgagcgcgagtcggtttattgcggacgggactgaaggccctcagctccgtttcttttttcaatggcttctccccccttactcgaatgaaattaattgtacaacacttcggttaattatttaatactttgacgcaaaaaagcgttaaacaatttgtgtgccgcactgacctgatgtagacacaccccgcttataaaaagtgtctgcccttttcacctgtttatccgtatcgcacccggggaaaaagtacacatatgataggcagttacgggaggattaccgatgaaactgagtttttgcacgacaggatttaagaaaaagcatatttttgacatcatttctttcgcgaaggagcactcctttgagggaatcgaactgtggtacggacacgctaaacaatatatagaggaaatcggcccgctcgacaggctttatcagcagcttcaggaggaaggcatcggggtgcctaccgtcagtttgtacactgacttcgccactcaggatgaaaggcaggcgttaaaggatgttcaaagggcattaagcgcggcacgacagctgcacagtcccttgatcagggtctttgccggcaatcttccttcgcaccggacgtcaccggaaaagtggcaacgtgcggttgatcaatttcagcaggcggcacggctcgcagatgactatgaagtcgatatcgggcttgagattcattacgatacgtacgcggatacaccggaggcggcgctggcatttttggaggatgtcggacatccgcgggtccgcaccatttttgacggctccaacctacacgtcaatcacgttgaccaaatgtccgctttggaaaaactgtatcataccgtcagccacattcatctgaaaaactatcactgggattttgacaactggtatctcagcaagccggtatccgttctgcaaggggatttaaggcaggaaccctttctgaaagaactgatgaacaggcaatacggcggattcgtatcactcgaatacttcggtcatcatgctgaagagcatatcaaagaatcactgaatgagatcaggcactgctttaagaaataaaaaacatcccctctgaagggatgttttttcaaattaagaaaaaaattttagaaatacagaagggattttatggataatcatctaattattaacactgtaacacatttcatttgaaaagggagtgctcgaaatgaaattcaaaaaagtgttaaccggttctgcgctgtctcttgccttactgatgtctgccgctcctgcctttgccgcatcaccaacagcatccgcatccgcggaaaatagcccaatctcaacgaaagcagatgccggcattaatgccatcaaactcgttcaaagccctaacggcaatttcgctgcttctttcgttttagatggaacaaaatggattttcaaaagcaaatactatgacagcagcaaagggtattgggtagggatttatgaaagtgtagataaataaaaatgaaataaacaaaaaacctccctttcaaaagggaggtttttttcattctatttccaccaatcatcaaacatcgatgccggcacctggcgcttatgctccgtactgagatagcgtttttccagcgcctcaatcacttcggaagaaacgtccttgccttctaaataatcatcaatgtcattgtatgtgatgccgagttcggtctcatcagtctgctgcggtttttcatcgagcagatcggccgtcggtaatttcaaatacaggcgttccggcgcgccgagctcttctaataaacgtctgccctggcgtttcgttaatccggtcagcggcagcagatcagctccgccgtcaccgtatttcgtgaagaaaccggtcaccgcctcggccgcatggtcggttccgatgacaagcagcccctcttgtccgccgatggcatattgagcgatcattctcattctggcctttacatttcctttgttaaagtcagacagctgatcgcccgtgtctttcttatactgatcagcgaacgcgctgacagcggacttaatatcaaatgtccatgatttatcaggtttaatgaatttgagcgccaattgggcgtcatcctcatcttgctgtgtgccgtgcggaaggcggacggcgataaattcagcgtttccgccttcttctctgatgctttcagccgccaattgggcgaggcgtcccgcaagcgtggaatcctgccccccgctgatgccgagcacaaagcctttggcacctgtttttttcaaatattgtttcagaaagttcactctgtcctcaatttcttgtttcggatcaattgagggctttacatggagatcattcataatttgtttctggatgctcatcccaatcactcctcctgcattgtttctttatgatccatttcccgttcatgctgaaaatgaatcatgccactatgtacgactctctgttaaatatagcacaggtgcagattttaagtgaatcaaatacaccgggatcagctgatttccacccgcagcgccgtgatgctgtctccgttgcattttcctttttcaatcggacaggatgaaaacgcgacgacgagatccatttccgcacggagccgtacataatcacccgcgtcagaaagaggcgtttcgactgataagttccccttctcatcgagcaccgtgttcataaagatggcaaatgggtaatgcatatgcggccgcggcaccccgaacggttcaagcgccccgctcatattgtcatagcacgtatcctggagctcgtctttatgctttccgtataaaagcctgttcatatccggacggcaggcgggaagcagcaggtcatgcttgccgactgtatcctcaatcagcgtcagcatcggcttgtataaattcgaataaatatgatcacccgtttttacatgaatggactggttggcatcaatcgtcgcgccctgatcaagatgttcatagaagtccttggcatgatacgccgtgaagtcagccacctgctgtccttccacatcgactacttttataatctgccctttgtgaaccttcaggccgagcccttttttcggcggtacaataaattgctgtgtcatcagactgctcctttttttcttctattatgaacttcggccgtttgtttcatgtaaagcaatttattggatgtatattccccttctgacggccgcaatctaagctttgataaaggggttgaacttcatgggtaaatcacaggaccagcctaaaggaaatctcgcttggtggcagctctccttaatcggcgtcggctgcacaatcgggacgggcttttttctcgggtccagcatcgctattgtcaaaagcggatattccgcgctgatctcatttcttattgccgggcttggcacctattttgtctttgagcagctcgcgaagctttcggccaaacagcccgaaaaggggtctttttgcgcttatgcgagaaaggctttcggcacttgggccggtttcagcaacggatgggtgtactggtcgtccgagatgctgatcacgggaagccagctgacagcgatctcgctgtttacgaagcattggtttccgaatgtgccgctgtggattttcgcctccatctatgcggtgctcggtcttttgattatatttacggggctgtccgtttttcaaaaaacggaaaatgtgctcgctgttgtcaagacagcggcgatttttatgtttatcgtgatcgccatattggcgctgtgcggtatattttctcataaaccggatgtgcaggtgccgaacgaatctaaggatttgttcccgcacggagcgatggggttatggacgggactgatttatgcgttttacgccttcggaggaattgaagtcttggggctgatgaccgtgcatttaaaaaagccggaggaagcctcaaaatcaggccggctgatgcttgccgttcttgcggtgatttacgtcatttctctcggcctggcgctgctgttagtgccgctgggcaaattcaccgaacaggacagcccgtttattacatcgctgaagggttttcatttagatatcattcttgatatttttaacgggatttttattattgcgggattttccacgctcgtcgcctcgctgtttgccgtgacgacattgctttgtacgatggccgatgacggggatgcgccgaaatgcttcagattaaaggaaaacaaaaaaatctgctggcctgcgctaggattgacgtttgccggactcatcgtctccatcatcctgtcattggtgctgccgaaaaatatatatgaacacatgacaaccgcggcgggcctgatgcttctttatacgtggctgttcattttgttctcgggcaagaaactgcttgaaacgacaaagatgggaaccgttcagattgttatcgcccttgtgctgattgtcgcggccgtctccgggacgctgtttgagaaatcgagccggcccggttttctggtcagcctttgttttctcgccgtcattgcgatcgtgacatggatcgtacaaaaaaagcagggacacagccctgccggatcatagcttatttcgtcggtttaaacagtctcttcaaataagaaaagggacactttgacacttgcgtctcatcatcacggaggaaatattgcttccattctaaattgtcttttcctccgtaccaccccaatcggggatgaagaggggcttcatcatacgcctctaagcgttttctgatcagccggctcatgtttcgtccgaacgcggttgaatcatttaatccttcgaaaacccatctcggctgaaacgccagcataaaaaacgggaagcttctgctttgtctcgcttcatgcgcaggcgtcgcgcatagaataaaatacggctcgccgtcaaagcagaactcccatttataatgttcagggtcctccggtatgtcttccggccagtctttcgggtcgcagccgctcagccggtttaaaaaagaccagaacagttcttcatacgcctcaacggaataatgctcagctaaatcctcaggcgtatcaaaaatcacaagcagcgacgcgtattttccggtattccttgagatctttccgtactcggacagcagcatccccacttcctccggggttccctcttcgcggggatcacccgcaaaggatatccggagctgatctgtcaaaaatccctgacgtcccggaatgcacggaaacgcgtccgctttatcacctactttttctgatagaagctcaaaagcgactctctgccaatttggcagatccaacaacttttcctcaaggcaactttttgtgtacagctcgcttgccatcagcccacctccagtatcgtcaggatacgttatgatggagacaggcgatgggtgacagtccttctatttatgagatgagcatttgaatcccctgccagccgaaataaaatccgaaaacgatcaaagacacacccgccgctcccgtcagccagcggagcgctttttcatgaaggagatttctgaaagtgctcgcggcgaccgccatgcagaaatcccagatcaaaatgccgagaagaatgccggagctgtaaatcaaaagctgatttgtatcgaaggattcagcggttttagcgaggatgctgccgtatatgccgagccagaataaaatgctcagcggattggaaagagaaataaaaaatcccgcgccgaatgttttgtaaaaagccggttttccttttccgcttctgacattcatggcttcccttatattttttagcgtttcgactcccgtataggtcagcacgaaaaaaccgaagagccacaaaaacgtttttacaaaaggagcggtcaaaaattgagacagcccgaaatagatcagaatcatatacagcccgtccgcggccatggcgccaagaccgaaaatccatgcatgccaaaagccgtttttgatgcctttgtcaatttgcgccgcattgaccggtccgacaggtgctgacaatgacagcccgagaacgatgtagcttaaaaagatgttcattggcttccccctcattcatgcaacttgtacaagttattcatgaatgggccgtgctatgatatattattttaatttctcaagctcgtcttccatcatgtccgtcgcttttcctaaaaaatcgaatatcagccgcagttcttcttctttatattgccggcaaaggctgatcgtagactgggataaggagctgaacaattgcttcacattcgcttttccggctgtcagcggcacgataatcacccgacgtttgtcttcggggtcttttttcctcatgacatatcccgctttttcgagccggtcaatgagcgccgttaccgaacctgtgctgagaccggtttttttcccaagctcgcctgcggtcatcgggcctgcttcatttaagatatcagctgattttaaatcggtcggaaacagaccgagagattgagcggccgcctgatgaaaaaggatcgtccttgtggccatctttcggaataactgtatcgcggtttcctccgtctcgcttctggtatttcttgttgacaactgacaggcctccctataaaatcaatttatcttgacgatcaagataattttcggcaaatctaatatgatcatagcaaatttaatgatcaaaagtaagtatgggaggaaaaagcatggaacaaacagccgcgaaggacgcctcgacgaagtttgtcgtcatcggtcttttgctgggcattttaatgtcggctatggataatacaatcgttgccactgcgatgggaaatatcgtggcggacctcggaagtttcgataagttcgcgtgggtgacagcatcatacatggtagccgttatggccggtatgccgatttacggaaaactgtccgatatgtacggacgcaaacgtttctttttattcggtcttattcttttcttaatcggatccgcgttatgcggaatcgcccaaacaatggatcagctcattatttaccgcgtcattcagggaatcggcggaggcgcgctgatgccgatcgccttcacgatcatttttgatttatttccgccggaaaaacgcggaaaaatgtcgggcatgttcggtgcggttttcggcctgtccagcgttctcgggccgcttttaggcgcgctcattaccgactccatcagctggcactgggtgttctacatcaacgtgccgatcggtattttatcattgtttttcattcttcgttattataaagaatcccttgaacacaagaagcagaaaatcgactgggccggcgcgattacgctggtggtttccattgtcggtctgatgttcgctcttgagctcggcggaaaaacgtatgattggaactccgtgcagatcatcggtctgttcgctgtgttcgccgtgttctttatcgccttttttattgtggaaagaaaagcggaagaaccgattatctcattttggatgtttaaaaaccgtttatttgctacggcacagattctggcgttcctttacggagccacgttcgtcattttagcggtgtttatcccgatcttcgttcaggctgtgtacggaagcaccgcgacaagcgcgggctttattttgacgccgatgatgatcggctctgttatcggaagtatgatcggcggaattttccagacaaaagtgcggttccgcactttaatgctgatttccgtggtcgctttctttatcggaatgctgctgctttccaatatgacaccggatacggcgcgtacgatgctgacggtattcatgctgatctcaggattcggcgtcggcttcaacttctcactgctgccggctgcgtccatgaacgatctggagccgcgttaccgcggaagcgccaactcaacaaactcgtttttgagatcattcggtatgacgctcggtgtgacgattttcggaaccatccagacgaatgtgtttaccaacaacctcacagattcattcagcggcatgaaaggagcgggcggtgcgatgcagaacatcggaaatccgcaggagattttccaggccggcacgcgcgcccatattccgccgcacattctggatcgcattattgacgccatgtcgcaaagcatcacatatgtatttacgcttgcgctggcgccgatcgtcattgcggccgttaccattttgtttatgggaaaagcgagagtaaaaacctctcaggaaatggcgaaaaaagcgaattaaaaaaagcagtacatggcgtttgtcatgtactgcttttttgtttactctgcgaaatgcggagcgagaatatctttcagcacgtttgcgctgcggctgaattgagcctgttctgtttcattcagctcaagttccgtcacacctgcgatgccgttccgattgacgacggccggaacgccgataaagacgtcgtttacaccgtattggccgtccagatatgtgctgacggttaaaatgctgttttcattacgcaaaatcgcttttgtgatgcgggcgaggctcatcgccactccgtaatatgtcgcgccttttttctcgataatatggtaggccgcgtttttcacatcgtcaacgatctgatccagctcgtcctgtttgtaagctgcatttttctccagcaattgctgcaccggcactccgccaatattggcgtgactccatacaggaagctcggtatcgccgtgctcgccgataatgtgggcgtgtacgttttgcggagcggctccgaagtattcgctcagcatataacggaatcgcgcagaatccagtgtcgtgccgcttccgatgacgcgttctttcggcagcccgctgaatgtccatgtcgcataagtgagaatgtcgaccgggtttgtggcaacgaggaagatgccgtcaaatccgcttgccattacttcaccgacaatgcttttaaaaatggcgagatttttttcgaccagctcaagtctcgtttcgcccggtttttgattggctccggcacagatgcacacgatatcggcatccttgcaatcctcatatgtgccgtaagatgttttgaccggatgaggcgcaaatgcctttccgtgatttaaatccatgacatctcccatggctttttctctatttacatcaatgatcacaagctcatctgtgatcccttggttaattaacgcaaatgcataactgcttccaacaaaacctgctccgattaatgctactttgttcactcgttcgttcatcatatatgctcatcctccagtgtttcgtggtgtctgtttttatcttgtgaagtatttcacatttatattgtgcaatacttcacaaacttttgcaagagaaaagtttgatttttggacaaaaaaatatcggtgatggtttccggattgttgacaacatcctaaaacggaaccgttttaggatgctgtcatcttttcagcgtgattgaaaacgcgctgtccttttcctaaccgaagtaagggtttgatgtgatgatggccctatccattaatgcggaagataaccgtttaaaccggagttgttatacaaaccattctgcacataatcaaagccgggctggttctgtccgggcacttgggcgctgccattgttaaaaatcactttggcattggccgtatccgcattcgcaggcagcgtcagcgtgtaaattccatttgcattcttagtcattgctttcccgggccacgatccggttaattctatggccctgcctccatcatgtttgtaaatatatacatttacctggccccaatgatccggattttgatagccaatgatgttggtttgggccgggtcttttttgacaaacgtgtattcttgggttctcgctgcaccctcgacgttcgttccggttaacttgatgttgtatgtcgtgccgattggatctcctttcccgatcgttaatcggtccccatccttaaatgctgtctgctgcccattattgatttggtaaacggcttttgttgttttcgcatttgcacgcagggtgaccgtcagctgatcattgaaagaatggactgcccccgtttggtaattctcaagaaagacatgaggcgcattcccaatatcatcaggataaagaacagccgccgatctggcattgatcgtacctgtcagtttgccgttcgctacttgaaatgaaccggcgccggccctattatcatacctgccgtcaggtaatttcgttgaagtattgatggtgacagaagacgatcctgcatttgccagcacaacgccttttgagccgcgctgattcataaagatttggttgttcccattcggattcgagagttcctcaggctgcccggccattacattgtgaaattgattgaccgcagtgatcgcctgatctttaaataaggcgctcccgcgatctcctatttgactttttccgggaaatcttacaccatttcctccgccctcaggtctggaaaagaaaagaggcgtgcttcctgagcgggaaccaatcactgcccagcctaaacgaatatcgtcatcactcatccatgtggactcttcatcatcattggcatacgtatcatgtgattccacccatgtgactaacttgtccgcagacacgtcagatgcataatgggagatattcgacacactcagattacggttctttaaagcggatctgatggaatgcccgtagttagaagccgtcacattcatataattcgcataagcagtatctctggacgcgctgtcttgcaggatttctccgtattggaactctgccgatatatttgtgatattcggccaaaattggctgccgtaattcccatcatccggaagctctatatgcttggcggcatcatagcggaatccgtctgctccgtcattcaatgctctttccaagaaacgtttcagatagacctgcacctcagtattctgtgtattccaatcatacagcccaagcaatgaattttgagtgacgtcccatcgatccgaccaatttttaatttgtgtgtttccatgggtccagtttgaaatacgcttaatctcgtcagaaatcgcggcataatcgctggtggtatgattgataaccgcatcaacaatgacttttacgccatatttttccgcggctgcacacatgtccttaaattcttgttcagtgcctaagtaacggttgccgatttggtacgatgtcggctgatacagccagtaccagttcctcatgcttttatctccttggttcccttcctttacttggttaatcggagacgtctgaatggctgcatagcccgcatcacgaatctctttcatattttgtgttaacgtattgaacgaccaattccatgcgtgaaggatggtcccgtttttgaccgatgacgcggccacctcattcgatttgtttgcagtttcagcgtttgcagccgccgggcctgacaaaaccaaatgaaacagcaataaaaatccggcgaataacggcagtaaagaggttttgaatcgtttttcaaacatttttgacactccttatttgatttttgaagactgactgcggagtcaaaaattcctcttactctttcttcagctcctttcaactgttgtgaagactggagaattttgttaacgcttacatttcaacttatcacactctctctatcaaagcaacgtgacagagtgaattcaaatctatattcctatcaattaaaaagacttcccgctttcaaacaaaaaaagaaaccacctgtcaagatgatttcttttttatttcttttatcgctcttctgtaagacagcttcacaatgacataccgaagcagaaacagaatgcctccgcagacgataaaaagaaagatcattttcagccaagcaaagaatgtatggggaacccccctgtcgtacatcgtaatcgccgctgccgcaaaagtgaccgcaattgaatctatccgctgctgcttcacccgcttttgcagttcttctttcgtgtctattctcggcatgagcattcccgacgctcccgccctgatgcaataataaacaattataatgaagaaaaccgccaagcttccggcccattccctaaacggacagttcagaacaagtccgcgtacgatgatgtcaagcaaagacagtgtgcccacaagcattccgacttctgaccaaatcattcgttctttctctttcacactctcactctttccattcacgtttgaaagtccgttccgacgctgattcatgacttcctcccgtactattaagaatggcttacaactcccattatatcttgccgattcataatgataaaccgaaatatcattgacaaaatgtttaataaggaccccaattgatcaggacgcctatgcagataaacacgaggccgatgacaaaccaaatcagcgccagcggaatcatgaagcgaagccactttacgtacggaatgccgctggcagccagtacggccatcagcacgccggaagtcggattgacacagtttacgacgccttctccgagcatgaccgcttcaaccgcgacctgtctcgtgatgcccatcagatcggcaagcggcgccaagatcggaataaatacgaccgcctcccctgagcccgatgaaatcagaaaatgaagcagggcgctggaaatatacattccgattgcgcctgccatcgggctgaaaccgtgcagcagtgacgctagtccattgactaccgtatcaagcagctttccatgttccaggataacggaaatgcttctcgccattccgacgatcagcgcaccgtaaacgagcccctgacagcctgtaataaacgtttttgcgacatcatttgccgccattcccgcaatcaggcctgacacgattgagataaaaatgaacacggcggccatctctgaatcagaccagccaagagtaagcgcgccgtataaaaagccggcaagcgacaaagccgcaacagccagaatcaatttatggcggacggtaaacgggacatgcttgtcctccggctcagaaacctgcgggagtgaacctgccgccggaaaccaatcgttccccagcagactggcgtcctttgcttttctgagttttctcgtataccgataaatatataaaatagatgataacagaaaacaaatgtagacggcaatccgcaggccgataccggaaaacagcggcagctccgcgatgctttgtgataacccgagcggtgaaggtgataaaatcgtcgcgttaaacccggcatagcagccgatataaataacggccgctccggccacggcgtcccatttcagcgagcgggcgacgatcaggccgatcggaataaaaccgatcacggaattaacgacgatgccggttgtgccgaggatcgaaaatagagatccgacaatcgcaataaacagcagctgttttgtgcggaacgtactgatgacattactgatcaatccattgatggcgcccgttttctccaaaatcgcaatggtgccgcccgtaaacaggattaaaaaaataatcggcgcggaacttgtcatcccttcctgaatcgcggtaaaaaaagcgatcgggctgacaggagactggtctaaagaatgatagcttcccgggacggcggacgacacactgccctttgtcaccctgtcaaattcccccgcgggaacgatgtacgacgctatcgcgcatagtaaagcgacaatgaacagcagcacataagcatcaggcatcacaaacaatttcttctttttcaatacaggttcggccttcggcacagccataacatcaccatcccgctttaaatttataaactattcagaaaatacagatatgtgctatattatatacagaccgattgcctgttttcaatatcaaaaataaaaaacagacagcttttgaaggaggacttacggcatgaacagactcacagcgcatgaaaagcaagtcattatggatatttttgaccacctgcacgccaatcccgaagtaagctggaaagaatatcaaacaactgaatatctgactgaaaaactgaaagaggccggctgccgaacccgcacgtttgatgattgtaccggtgttgtcggcgaaatcggagaaggctcgcccgttgtggctgtccgggcggatattgacgcgctgtggcaggaagtggacggtgtctttcaggcgaaccattcatgcggacatgattcacatatgacgatggcgctcggcacgatgatgcttttaaagagtcagccgaaacttccgaagggcaccatccgctttatttttcagccggctgaagaaaaaggcggcggagcgctgaaaatgattgaaaaaggcgtactggatgatgttgacttcttatacggcgtgcacgtgcgccccgtacaggaaacggcaaacggccgatgcgcaccgtccattctgcatggctcaagccagcatatagaaggcctgattatcggagaagaagcccacggcgcgagaccgcatctcgggcttaacagtatcgaaatctccgctcttctcgtccaaaaactcagcttcattcatcttgatcccggcatcccgcattccgtgaagatgacaaagcttcaggcaggcggtgagagttccaatatcattccgggaaaagcatcgttcagccttgacctccgcgcacaaacaaatgccgccatggagaaattaaccgccgaaaccgaaagagcctgtgaggcggcgactgccgcattcggcgcaaaaattgaattacaaaaagaacacagcctcccggcagccgagcgaaacaaagaggcggaagccatcatggcatctgcgatcagcggcattctcggagaagaacatgtggatgaacctcttgtgacaaccggaggagaggattttcacttttacgggttaaaggtgccgaacttgaaaacgacgatgctaggcctaggatgcggtctggagccgggacttcaccatccccaaatgacatttgaccgaagcgccatctttactggcgttgagatattaacggccgccgtcctcaaatcgtttgaagcataagaaaagcagcccgttacagggctgcttttcttcgttatttcttcaaatcttcaattgaattgacgtttttcatatactgaggaacgaccagacccatcttgacgcctgtcagactcgttcctacatcttcatatttgcctttatatttagacgcatatgccttatgggtattcggaagccaagcagacaatgacgcatccgcgctgcctgtcgcaatcgcagtccacatcggtcctgcctccacttgcgtcagcttcacgtcatagccgaggtcttgaaatacttttccgattacattcgtacttgcgatttcactgtcccatgccacataagccaggttaattttatcccctttaactttatgggcgccttttgtccattgagccacttggtctttgtgttttttcacatattcagcagcggctttggccggcttttcgccttcttcaacggcaatcatgacttctcccatatcgtcctgcgtccatttgaactggctgagaactttggccgcgttaggctgttccttactgaagccggttcttgtaattgtatgaatctgctcggcagttccgtacgtttttttcggatcatcaaggaacttcagcttgtatctggagaacatccagtgcggcgtccagcccgttacgatgatcggctttttccggtcatatgatttcttcaatgtcgccgtcatggcggcacttgacgccgtgacgacattccagtctttcaatccgtaatccttcacggcctcatccgtcagggccatgatccccgatcccggatcaataccgataatggttttgttcacctggtccgcagccgttgccttaccatcagtctgcgaaccgcaggcagccaaagaaagagccagcgcagcggtaacgccgacaccgatgattttcttaagcatcaggcattccccctgctcttcttcttcactttaatgttttgcgtgatacggtcgagtgtaatcgctacgataacgatcgcgataccagcttccactccgacaccggttttcaactgtgtcacggcgctgtatacttcagaaccgagacccggcgcaccgaccatggccgcgataacgaccattgacaaagcaagcatgatgctttggttaataccggcaagaattgtttttgtggcaagcggaagctgcaccttgaacagacgctgagacgtcgttgaaccgaatgcttccgtcgcttcgatcaaatcagccggaacttgtttaataccgagaaccgtcatgcggatcgtcggaggcatcgcgaaaataacagatgccacgacgcctggcacaaccccgatattaaagaagaaaattgcaggcagcagatatacgaaagccggcatggtctgcattaaatccagaatcggtgtaacaatgcggcggaccgtttctttctgagacgcccatatgccgatcggaaccccgataataatggaaatcaaaacagatgtgacgacaagcgccaacgtttgcagcatcggcgaccaatagcccaaataatcaataacaaggaatccgattaacgtaaagagtgcaattcctctcgtactgatccaccaagcgagagctgcaaaaataacagtcaataaaatagacgggatgaaacccaaaccgctcacaatcgcgtttacgaaagcggccaaaccgtttgagattccgtcaaagaaacccccgaacgtcatggtaagccagtcaacaaaccggtcaacgatatctgctaacggaattctaggcaatctgtccatttacttcaccccctgaacagaagaatcctgagcttgttcagcagaatcttcaacatttatataatcgttatttcctgaaagcgcgccgattaatgcgccttttacgacaatgcctttcatgcggtccttatcatccgtgacggcgatcggaatattcgcatcagacacgacatcgaaaatttccgtcaagtatgtgctttcatgcacagtcgtaaattcagtatttaaaatatcctgaagcgataagtcggattccaccgcttttttcgcatccgccgcgtgaatgacgccgagaagctgtttctgtttatcaacggcgtaaatagaagaaataccgagattcttcatgagctgcagcgctacacgaggccctttgtcaatccgcacggtttcagcgcgcttcatgatgtggcccgctgtcagaactttggataaatcaacgtcctcaacgaatttctcaacgtattcattggacgggctcatcagaatttcttcaggcgtcccgatctgaacgatgttaccatctttcatcagcacgattctgtcgccgatgcgcaatgcttcatcaagatcatgcgtgataaagatgatcgtcttgccgacagagtcatgaaggtctaaaagctcatcctgcatgtctttgcggatcagcggatcaagcgcactgaaagcttcatccatcagaagaatgtcaggatcattcgtcaatgcgcgcgcaagtccgacacgctgctgcattcctccgctgagctgatcagggaattggtgttcaaagccttcaagaccgacaagtttaagcgaatcaagcgctttttgctcacgctcttttttgtcgacgccttggagctccaaaccgtattccgtattttcaagaatcgttctgtgcggaaacagtgcaaatttttgaaagaccatgctgatttttttccggcgcacttcccggagctggtcttttgacatatttgttatcatgtcaccatcaatataaatattcccggcagtcggttcaataagccggtttaacagccgaactaaagttgatttaccgctccccgatagacccatgatgacaaatatctccccatcatatacatcaaagtttgcttgattgacaccaacggttgatccggttgctttcaggatctcttttttgttttttccgctggacagcatctgaatggctttttttgtctgttttccgaaaaccttagatacattttcgacttttatcttaattggtttctcatccaaattcatattttccctccataataagcaatctttaataccgtaacacgtttgtaataagtcaaacaaacatcataatcccgtttattttgtatcattactttaaaaacatccctgtgtcttattttcctctggtatgcttctaaatactctctaatcctccttattgaggataaattataaaggaaaccgggcttttatcaggcttgagaacgtttccatcgaatgtgctgcaaactgatttcctatcctttttttacaaaaacaagaatttttttgcgacattgtcccggaaaaagaagttttcgcctcctgaaaataaggaatattaaggaaaaatataggtctgccaacagacagctcactaaaaaaagcaccccaaaagggtgctcattgcgcaagctctgtctgtttcgtttcttttccgagaataataatggtgatgacggcaatcaggatggccgcacaaaagacggcgaaaatcactgtaaacgaaacgttccgggctgcaagcgatccgacgagaagcggaccgaaaatgccgccgattctgccgacggccgccgttgtgccggaaccggtcgcacgaatcaccgcaggatactgctccggtgtataggcgtaaagcacgccccatgcgccgagattgaagaaggacagcagcatgcccgctgtgagcagcatggccaatgaatccgcggcaccgaagaaataagcgctgcccgccgttccgagcaaatagatgactaagatggtcttccgccccgctttttcgatcagccacgccgcagagaaatatccgggaagctgggcaagtgtcatcagaaggacgtattcgaagctctcaatcatgctgtagcctttcatcagcatcacgctcggcagccataaaaacatgccgtaatatgaaaagacgacgcagaaccaaacgacagacagcagcaccgtcggccggatatacggtttcgtccagacacttcccgcctgcccgcgtatgctttttttctgcggcaatgcctgatgcgccggtgattccggaaggcttctccgcaagtacagcgcataaaatgcggccagcgccgttaagagcagcgcggcctgccagccgaatgacggtatgacaaagtaggaaatcaccgccgcaagaagccagcccgcggcccaaaagctctcaagcagcacgatgatccgtccccgcttttcgggagcggacgcttctgacacgagcgtcgaggcgacaggcagttccccgcccagccccattccgatcagaaaacgcaatatgagaaaaaccgtcaatcccgttgcgaaagcggatatgccgcttccgacagaaaagaataacagcgtgatcataaacacttttttccggccgatcctgtcggccagcattccgaatacaaaggcgcccgctgccataccgatggaattgacgcttccgatccatttcatttgatcgggtgttaaattccaatcagtgtgaagcgcggcgataataaacgataaaattccgacatccatcgcatcaaacagccagcccattccggcaatcgccagaagttttcgcggagtgacggcaggttgtttattcataagcagcacctcaaatcgaaaatgattaccgtataagtttacacctgtctttacacattgtcattatcttttttcgcaaaaaatcccgcttgccgtaagcaagcggggtgtgtgttaattctttaagactgcgtttttaatattatcctgaagctgttgaatccgtttcgcgccgtcttctctgatacgtctgttctcttcctcgatctgtttcgtttcctgcataccgctgacaatcgtattccaagacgtttcaatcgtctcaatgtcaatgctcggacggcctgccatacgggcaatctccacgctttggtttgaaatattttcagcgtttcgcttcagcatttcattcgtgcggcggtccagctcgctcattgaatcagccacaagcttttgccgtttgactgtgacagcctgaatgatgccgtttttgaaaatcggaatcgtaatgacgaaagcggaattgattttcccgatgagcttcgtatttccgcgctgaaggaggcggatctgcggcgccgtttgcagcgccaccatccgcgccatatctaaatcatagacacgttcctcaagcgcctgaagcccgtcacgcagcgtatcaagctgcatttgcgcaagctggtttccgccggccgctttttcttcataagaaggaatgagcgcctgcatttcctcaagcttcatctgcccggcaacgacatacttttcaagctccatgtagtagttaatgttgttttcatacatctcttcaagcgtatggttcgtctttgccatttcatctttgtattttgaaatttcgacgtggattttttcaatttctccgcccagggtgcggtacttttgaaaaatcttttcaatcatgctgttgcctcgtttgaacattttagcgagaaatccttttggttcatcgaaatcatttttgtcaaaacggtccatgatttttccgagctgcgtcagcattgtgcctgaatccgtgacacttgttgttttcatcatatttaagatgcggtcggagaacttcgagatttcaactgccggttcttttccgtactcaagcagctccatttggtttttcacgtcaatctgctgtgaaatgcgctgcacctcaggatcttggcgcagctgcaccctgatgtcatctgctttttgttcagaaatctcttcatttttatcaagaacaagcggattttgattttctgtcatgttttatttactctccctgcttttgcgtaatggttctaaacagctttcttacgagtgacggctccttatattcctgccgaaataccatgtcctccagccaatggacatcaaattggctttcttcaatataatgctcaatgtcctgatggcccggcggattatacaagatgatatcgacgccgaatttatttaaaaacaatagagcggcggcgtcagaacgtgtaagttcgccattttgttccgtatgatataaaacgagtttcggaacggtttgggcgtaatcaaacgtctgaatcaattgcagcagcgaagcgggcaggttcgtcgcctggcggaacaaatagattgcggcatcccttgcctgctccccgggcaaagccttcagccctgggtttctgcacatgtcagaaatcacattggcgatggcgttctgcacgcctgacgggagatgcttgtactgccagatgttgcttcttttcagcctgtccgcgtcaatcgctccttcttcgttcaaaacctgactgtagtgatactggtagttggctttcagctcttccgtaaacggaaaactgcggatcatgtgtgtctcctgatagtctgcggcggtatggagtctgttccaatattctttcgtatctttggaaacccccatcactttcgcaaaaaggttcggaacggccacccgctccctgtccgctttaaattgcggccggataaacgcccgctccttcgcaatgagaaataactcatcatacgtcgtttttaatgtcacggactgcggggtatgatccctgaactgccaaggcttatacatcatagattcctcatggttcagcacatgctcaatttctttcgttgaccggtaggccgtcgtggacgttctgtccggcttttctttcgggaatggctcaaggccgcctgttgcggggagctttatcacaaagctgagttcctcatccggatcaatcaagctgaacgggtcttccgcagtcggatgaaacaataggacgtcacagccgatcagcatgagataatagagaaaatagagctggcttttggcagcgtctccataccacaccaccttcggcatctcacgctctatatcggcttgttcgagccatggattcaggtggttcagcgaaaactttgacacatccaagagcacacgccggaaatcgggatgattcagcccgttttcatgccggtccgcaaaggtttccaaaagcgtcataaacgcggttctcagccggcggtgcataagcggatcagcgtgtttggcaagcagcctgcccccatcgagaaacgcgacaaatctggaaaccgaaagccctttctctttttgattgaccgaatggatgtgctggagcgcctgaaacgtttccggcgcgatggtcttatccagcgtctcgcttaacacatggatgttttcatgagaagacagctcgaaaagcttattgtaatactccgtctcatcataaggagtacccaaaatccggacggcaagacgggtaaacgccagcccgttttcccgctcgtaaccgggacgttccggcagcggccgcatcagaaacgtttcccagtcatcgttttccggctcggcctttcggatcaccaattcttcctgcctcatcattttcctcctttctcttcatgatgatcggtacaaaaaaggaaggaaatgaactctccctccttttttgttttattcttctttagatgcagccgtttgctcctgaacctgcttttgtttgttgaaatagtggataataaacgttaccacaaacgcagcgatgatgattccgaagaacaccacgtgcggcatttcataatcaaaggcgctcgccgccattttcacggcgataatcccgatcagcacaaaagccgtattttcaagctcagggattttatcaattaaaacaaggaatacttttgcgactgtacgcatcatgagaatgccaagcataccgccgatcaagagcacccacactttttccgataccgcaaacgcggccagaatgctgtcaacagagaaggccaaatccattaactcaactgaaacgacagtggcccagaaaattccgaacgtacggaccatccatgaatttttcttcatgccttccgtatcgtcatcaccttctccgatccagaaatgcttaatgacgagccaagccaggtacagcgcgccaagcactttaatccaccagaacttaatgagcagcattccgatcccgataaagataaaacggaaaatatatgccccgaacaatccgtatgttaatgctttcttccgctgtttttcaggcagatgccttaccatcaccgcaagcactaacgcattgtcggccgacagcagcccttccagcagaaccaaggaaccgatcagcccccatgatacagggtcagtcagcacctcaccccacattttccaatcaaaaaaggaagcgtaggtcgacataatatgatgtagaaaatccaagttttttcctcctatttagtaaaacggtaatttcctgcttacacctgcaagccgtaattccggcaaagtgatgccagaccgccggaaaacccgctgccgatggcgttaaacttccactcagccccatggcggtaaagctcacaaacgacaaccgccgtttcaatcgagaagtcttcccctaaatcgaaacgaagcagttcattctggctgttttcatcgacgacgcgcacgaacgcgttcgaaacttgtccgaaattttggccgcgcgcttccgcatcatgaatcgtgacggtgatgccgatcttttcaatatttgcgggtatttttgagaagtcgacgataatttgttcatcgtctccctcgccctcgcccgtccggttgtctcccgtatggatgacgcccccgcttgggtgttccaggttattgtagaaaacaaaatcaagatcatttacacagttgtcatgggcatcgacaagaaaagccgacgcgtcaaggtcaaagtcatgccctccggagtacttgttcgtatcccagcctaagccgatcaccgcttttgtaaggccagggttcgtttttgtcagatcaacacgctgtcctttcgccaattgaatagccatgtgccgtctctcccttctgtgtgtgatatggttcagccgatttgcaggccgtaatctgtcgcaatacgggccagtccgccttggtagcctgagccgatcgcggaaaatttccattcgccgttatgtctgtaaagctcccctgcgataatggctgtttcaattgagaaatcttcagccagatcatagcggatcagctcctcatttgtctcttcattgacaatgcgcacgaacgcgttggaaacttgtccgaagttttggccgcgcgcttccgcttcatgaatcgtgatgacgaatgaaattttgtcaatagccgcgggcaccgcgctcaggttgactcttacgctttcgtcatcgccctcgccctggcctgtcaggttgtcgcctgaatgtgcgacagagccgtttccgccttcaagctgattatagaaaatgaaatcatcgggcgacgcgcatcttcctgcttcatttaatagaaagacgctggaatctaaatcaaaatcatgtccgccgtcgtatttgtttgtatcccagccaaggccgacaacgactttagaaagacccggatttgttttagtcaaatctactttttgtccttttgccaatgaaattgccatgtgtgcactctcctttttatcgtttaggcgtatcggttaacgatatcgccgatttttgtatcgtttgtgccttctcctactgcggcgaatttccactcgccgtcctggcggtagatttcagccgcgatcaggctcgttctgcctgaatagttatctcttaaattgtaagtcaccagttcttcgcgattagcctgatcaacgacgcgaatgaacgcgttttgaatcatgccgaagtcctgttttcgtctgacgcagtcgtaaatattgacgacaaacacaagtttattaatctgagcgggcactttcgccaaatcgatgaggatttgttcatcatcgccgtcgccttcacccgtcaggttgtcacccgtatgtacgacaccgccgcaccggcttttcaaattgccgaaatagatgacgtttttgctgtctgtcattttatcattttcaagcatcagtacggaagcgtcacagtcgatattggcaccgcctccgccgaacagctttccgaaaaagcccccggatgatacagggtcccagccgagtccgaccagcagttttgacaggccggcttttccttttgttaaatcaatccgctgtcctttttgtaaagagatcgccatatgattcactcctattctgtaagggtgccgctaagcacgccgcaagtgcgcatttttactaaattccgggacaagaatcccggtgtttattaagatatacgtcttttattatatcaaagtttcataaaacataagaatttttggcgaaaaacggcgaaaaattacttcctatattctccttcgttccggagaaaatagagaaaacaaagaaattgacgaagactgaacatttttcctatccttgtatcaatacatgtcaggaaaggggcagacgagtgattgatttaagcatacttgatcaggcgcccgtatccaaaggaaacgggccgcacgagacgctccgccgttcagcggagctcgcccgcctcagtgaaggatggggctataagcggtactggtttgccgagcatcacggcacaagagggctcgcaagcgtttcgccggaaattatgatcgctcataccgccgcagccacaacgtccatccgtgtcggatcaggcggcgtgctgctgccgcagtacagcccctataaagtcgcggaaactttccgtcagcttgaggcgctgcacccgaaccggattgaccttggggtcggacgctcaccgggcggcacgacgaaaatccggctcgccctcacagacggggtaaagaaaagcatgaccgagtttaacaggcagcttcaggatttatcatcctttctgacagattcggttccctcggaccatgcttatgcaggaataaaaacagcgcctttgattgaaacagccccgcagctttgggtgctcggcctcggggaaaacagcgccagacgcgccgctcttcaaggtgcgggctatgtcttcggccatttcattaatccggaacgcggggaaaaagcttttcagatctatcgggaccatttccgggcctccgcccatttttccgctcccgcctcgctctgtgccattttcgtcatatgcgcggctacggatgagaaagcggaagaactcgccttaagccaggatttatggcttcttcgtgtcggaaaaggcgccgacagccgcgtgccgagtgtggaagaagcgaaggcttatccatattcgccggaggatcgtaaacagatagaagaaaaccggaagcggatggtgatcggctctcctgccgcagtgaaacgccgtctgcttgaactttctgcgcggtatcagacaaaagagatgatggtgctgtgcaacgtctttgatttcgaagcaaaaaaagagtcatatgagcgtcttgctgatatatttctgtaaaaaaagccgtcaaacggagcagcagatgagactgctgcaccgcttaacggcggttttttcgttcttttccttttttaaacgcattccaaatcccttgcagcgtaaacccgagcagaagcagaatgattaacagtaaagtgattgacggccccggaggcgttccgagctggtacgaagacgtcagccccatgaacacactgaaaagagaaataataatggctgccgcaaacacccatttaaaccctttggcgatacggattgcaaaagccgcgggcagtacgaggagcgcggaaacgagcagcacgccgataatcggaataatgaccgaaatcgccagccccgtcacgatgctgaatgacattgacagcaggtttgtgttaatgcctgatgtcttcgccgtcgcctcgtcaaaggtaagcagatagagcggtctgtttaatataatgaaataaagcagaatcagcagggtaatgcctccgataatatagacctgctgctggctgaccgtgacaagcgatccaaataaatattgatcgatgctcatcgacgcgccgccttttgacaggctgatcagaaacatcgcaaacgacagcccggccgccattaagattgcgatagatacctcggaatatgtacggtacgcccgccgcatgtattcaatgccgatcgctccgatcgtgacgacaacgatgctcgccgccgtaatattggtactgagaaaaaaaccgatggccacgcccgacaatgaaatatgagacagcgtatccgccatcagcgcctgtcttctcagcacgagatatacgcctaatatcggcgccataattccgatcatgcttcccgctagaaaagctcgtcgcatgaattccaagtcaaacatttccatccgcctttttcccccctttcaagccgtatgactttatccagatactgctgtacttcgttttgttcgtgtgtcaccatgacgacggtgcggttgtgatttttcacctgatggtgcataaattcgtagaaaccctgcctgctttcataatcaaccgcggttgtcggctcatcaagcatcagcagatccggattgctcgcaagcattctcgcaatgcagattttctgcttctgtccgccggataaatcgccgattttccggtggcggaaatcccacatttccaccatcttcagcgcgttttccacctcatggtgatccgtttcgttcaatcgtttaaaccattttcctttcgtataacggcctgattgcacaagctccagaaccgtacttgggaatcctgcgttaaatgaagaaatctgctgcggaacatagccgattgtcaggcgttttccggctgcgttttttttactgatctcggccgttccttcccaaggtctgagcatgccgagcatgactttcatcagcgtcgattttgacgcgccgttcggtcctgtaatgccgacgaattcgccgcttttgatttccagcgacacgccgtcaagcaccggtgtatgcgaataaccaaaaacgatatcttttaatgtaacgagattcatgctgaccttcctttcccgcatagaaatagtgtgcaccccgcggcgcacactatgttatttaaccaatagcgaatctttcagtgcatcaaggtttttctccataatgtcgatataaccgatgcctttatcccgttctttttggcttaaaccttccagtgtattgagcacttccgttttcgcgccgatttcaccggcaagtgtatctgcaactttaggcgatgcaacttcttcaaagtagatgatcttcacatcatgctgtttggcaaacgttttgagatccgccagtttggccgcactcggctcttcttcaggagaaaggcctgcaatcgcgacttgttttaagccgtattctttggcgagatagctgaatgccgcgtgctgtgtgatcagttcttttttcgccgctttatttaatgttgtacggtatagtttatcaagatcctgcagttttgcaatatattctttactatttttctcatagtatgctttattcttcgggtcctgttttacgatctgcgccgtaatggttttgacctctttttgcgcaagaaccgggctgagccacacgtgagggtccatgctgtggctgtggtcatgaccgccgtgtccatgttcctcttcctcttcatccgaaccttcgagtaagtcaattcctttcgacgcctttacaaacttcgcatgatcagagcccatgcttttttccgctgaaggaacccatgtctccatatattcgctgttgtatacgaaaagatcggcgttttgaatgccggcgatatccttcggcgtcggctcccaatcatggggttcgaccgaagacgggatgagaatgtctacatcgcctttgtctttgacaatttgtttcgtgaattcgtacataggataaaaggtcgtcacgacgtgcagtttgccgctttttgaagaacctgacgaaccttttgaagatgaattgccgcagcccgccgcgattaaaaagcatgccgcaatgacaatgattccgctccattttttaaacaagccgtttccccctgttctgtaaatcagaatgataacgatttccaaagcgtactttctcgttcatttgttacctataccataataaaacgaagtaattacgttttgcaagatatttttttctaaattgatatccaatttacctaaaaagcccccgccatgtatggacgggggcgtcctatcacatatcaggcaagcagataaactcttgtttcgtatgggcggaatgtgatgcgggattccgtgccgctgtcattatcatagttgctgagaagcagctcggccctttcaggttcggaaccgtccggccaataaaaagcggcttcttctttcgatacgttgctgatggacatgagtttttgtccgtttgcctgtcgttcatacacaaacagctgcgggtcatcagggagcagcagcgtgtagctgccttttatgatatcagcatactgttttcgcaggcggatcagttttttgtaaaagttcaatatagaatcgggatcatcctgagcctcggccgcattgacggttttgtaattgggattgaccgcgagccacggttcgccctccgtaaatccggcattcttgctgccgtcccactgcatcggtgtacgggcatggtcccggcttttcgccataatggacgccatgacttcttccctgttccggcccatttcaaatacccttttatgatacatattgatggtctgaatatcttgataatcctctattctgtcaaacggagcgtttgtcatgccgatttcttccccctggtaaatgtacggcgtgcctttcatgaaataaagcagagcggcaagcattttggcggatgctttgcggtatgtgccttcgtctccgaaacgggatacgatccggggctggtcatgattgcaccaatacagcgtattccagcctcgatgttccagtttttcctgccaatctgtgagcactttcttcaaatcggacagctcaagcggttttacatcccaatgctcttggcccggcttttgatcaagctccatatgctgaaaatgaaaaatcatattcagttcatgctcatcggttcccgtgtagaccagcccttcttcaggcgtcactgatccggcctcgccgaccgacatcacgttatatttggaaaatacctctttcgtcatttcttttaagtaatcatgtatccgtgccccgtttggccgaaaaggcttcggatcggcccggcgggcgatgtaatcttcatatggcggcaagtattctttttttgacagaagatggagctggtctattcgcaatccgtccacgcctttatcgagccaaaatctcatcatctcgtacacggattgccgaacctcgggattttcccaattcaggtcggcttgtttgacggcgttcatatgcaggtaatattcgcccgtatgttcttcgtactgccagacggattgtccgtaatccgacacccaatcggtcggcgggccgtccgcggtgcccggccgccaaatataataatcgcggtatttgctgtccggattcatttccgcctctttgaaccaaggatgctccgtggaggtatgatttaagacgaaatccatcacaagctttaatccgcggctgcggcattctgtaagcagatcgtgaaagtcctccatcgttccgtaagattccataatcgcttgatgatccgtcacatcgtagccgttatcgacgtttggcgacgggtaaatcgggcagatccatatcacatcagcgccaagttcttttatataatcgagacgcgcgataatcccccgcaggtcgcctataccatcgccgttcgtatcttgaaagcttcgcggatagatttgatagacaacggcatctttccaccagtcattctccatcttgcggccctcctgttttttagagaaccatttcctttatgatccttccctaaacaaaaaagagaaggtttccccctctcttttatctgtccagctgagacggataaagcgtcatgcctccgtcgacgaaaagtgtcgttccggttacgtaactcgcttcttccgacaccatccatgcggcggccgcggcgacttcttccggttttccgaaggcgttcatcggaatttttttcagctgggcctgtttatgtgtttcatcttccagatccttattggactccgtggcgatcgtgccgggagcgatggcattcacccggatgcctttgtctgcgtaattgagcgccatcgtttccgtcatcattttgatcccgcctttggatgccgagtactgcacgttttcaggacggggtatttgctgatgaacgctcgatatgtttaagaccgttccttttttgccgcgctcaagcatatgtttcagtgccgctttcgcccccaaaaaggtgccggtcacgttgacgtcgatgaccctttgccaatcctccaggctcatttcatggggcatcgcttcggccccgttaaagccggaattgttgaccatcacgtccacacccccgaaatgctcctgggcggcatcaaacagcgcctgaatcccttcttctgaggatacatcggcttttacggtgacggctctgcctcccgctttctcaatgatgtccgccgcttcttccgctccggcggaatcaccgaggtagttcacaaccacattcatccgctccttgccgaagcgttcggcaatggcttttccgattcctttcgaagaacctgttacgattgctgtttttccctgtaaatcctgatacattgtctcatttcctccctgatgttaatacagagcatgtacccggttttgatcggccgaaaacaaaagagatcataaaaagaacgatgaagccgaagctccctcgttctttttttcattatgcgtagttgttcatttgcagccttttttgcacgccgacaagcctgctgaaaaaataagatgccgctttgtagttctcccgtttatgaaagaaatgagccgcgtcctgaagcagttcctctgtgtcagccaacagctcttttgattccagaatgtcaaaatactctttgagtgaatcctgtccgccttccccctgataaagctctttaatcagacggaatttcgtcatatagatctcatcttcccactccgccgcgcttctcatgccccgcgcgcagctggcggcggcttcactgtatttttccgttttaaagtagatatgcgtgagtgaaaaaacagcctggatgacctgccggaagctgtgtgcttcaaatccggcagccgcccgttcaaaatcctccgccgccttgcaaaagtcacccagactgtacatacagtgcccgatattataataggccgcagcaatcatatattgatcatcaagccgctccgcgtgctccaaggcgcattcgaggtattccagcgcttttttatgctgctgggcgtccatcagatttccggcaatgataaatttgcactgcacccttctcattccgtataattcatatttcttgtaaatatcaagcgcctgccccgcgtaattcatcgaaaagaaagtctgcttgatgtgatagtacacctcagaaattttatacagaaactcggctttctctatgtcatcttccacatattcaagcttttcctcagcccgcttataatgagaaatcgctgagatgaagtttttctgcttaaattcatacattcccctgaaatagtaaaaataatattccagtaagccggtcagcttttgctggttcatctcaatctcagtgagcatttcagagaacggaggctggcagtcgccgtctttcatgggttttaatttatccagcatgatgcggtgccgaaattccatcaatgaaaaatacaacaataaatcctggttctcttccatatcttcgagttcatattgaatctcccgcttcagcgcttcagcttgatcggcttcaaacgcgcggatcagcttataccattcattcatctttacggccacttcttcagatggaatcttggatttcatagattcgcctccttcctccagctactaattatgttatattttatcatagcaaatttatggcagtgagcaaacaaagattttaatcaattaaagaaagagagaattcaccatgaaacgaccagtcagaattgcgctgcttttgatcctcttcttttccgcagacctatgtttttcctatgtgcagaaagaattgaggccgcagacggcattacaagatagagccattccaagcgctcttcatccgctcgtgaaacagaatgcggagctattgcagacggccgctctgaacaaaggcatcaccgtcgttatcacagagggtttcagatcaattgaggaacaaaacgaattgtaccgtcaaggacgttcaaaaaaaggaaatatcgtcacctacgcaaaaggcggggaatcttaccacaattacggccttgcgatcgacttcgccctgcaaaaaaaggatggaagcctgatttgggatatgacgtacgacggaaaccgaaacggcacgcccgattggcttgaggtcgtatcgattgccaaaacgctcggttttgattggggaggcgattggagaggctttaaagattatcctcatttacaaatgatccctggctaataaaaccttttcttttttcgcttttgcgcatcaatgtacggaggatagacaggcctgtacacaagcttatatccttcattgccggacggcgtaaaatcgcgctgccactccagccgcagatggaaatcggataaaaaagcggcctttgcttcttcgggagtaacggccggcaccggattgatcttctccagctgctccgggtcaatgtcaggcgccatgtaagcttccacaagccccgttacgggactgacaagtattctcgcagcgccgaaccgcagcggaatatcctgatgccatatggaaaaatggaagcggaacctgccccttccgtccgttttcagcgggttcattttaaaaaactcgtccgctctcggataaagcttgtataaaaattgaagcgcgacggcctcacactcttccgcagaataaaaggccgggccctgatgctcaataaaagatttaaaggctgtcattttccctgactttttgtccgttttcatcttcattgtatttttgttgctgctttcaaaatagctttcgatactcaaatctttccgttccggaaccgaccctttccgccatgtcgttccgatctcatccccgagatcgcgccggcgcgtctgaaccatatccgaggtaaaccccattaattcatccaggctgatttcccgtttatgttcaaacgcgggaagcggttttgccggctcattcctgtcttcgcaaagctgctgatccggcacgatatcatcttcaccggccggatagctgtaagccggcagaatcggttcatagacgagacgcggtattttctcaaaattgaccacatcatagacgagactgaatgtcagcacactcatgtaatgcgagacgactttttcccgatcgacgaatgtttccgggacgggcgcttcacccttatccccgtaatagataaactgcacgacgaagccgctcctggttacatcaacgaaaaaacctgaatcgggaagcggccggcagagcactttttttgtatagataaatcggatgcacccattgcgttcttccctcgcctgaaagatgaaattcataaaagtaagcgggcggtgtctcgccgcaaaccgaagagccgtcagctttaattcggcgtctgacagctgcatgtctgaacccggacagtcgttgcgtgaataggtaagcaaagatccgtcgtcgcccagctcaatcgtgaccgttttatccggatggttacgatctttccatatataataggctttcgttttttgtttttcatcataatcttctatttcaagctcatagtccggcggtatgttcccgatttccagcgctttttttctcagatgttctttcagcaatggggtcatcctttcagaagagtgtataaaaaagaactgttttttattatataaaaacgtccttatccttttaaagggaagaaagtgccttttatgtgtctatttttagcaaagagggaaaagagccgtattcagagcggctctttttcatacaaatgtcacattccccgcgaaagccccgggacgaacgcccatgaccttcagcctattaaactcgtgatcgcttcccctgtatgagcctcaataaacagcgggaaaaccggcttgtatacgagcctgtacacttttccgcagctgtcgtcatcgtaacaacgatcccaagcgagctcggctttgatggcccggcggatcgcgtctttcgcctcttccattgtcaatgaaggaacgggatcgatttcctggagctctttcggatcaatttccggcggcatatatacagtgacaagacccgtctttttgctgacacagattctcccctctccgaatcgcaaatcaacgccgcccgaacaagccttatatgtaagtcccacgttttctccttcatcatccggctcatcatattgaacccggaaatactgatccgcttccggaaacatggcgaataaaaagcgaatggccatgtgatggcattcttcctcggaaaacctcggttcgccttcaacttttataaatgacatcaccccggtgagccggcccgattctttatcatgcattgttttcaatacgtgttcattccgttctttaaacagactttcaaagcttttatcttcccgtacggattttgttttttcaggacgccaggcaacgccgatacagccctctccaagatcgctttccctctctttataaaaaccgtcgtgcagcccgatcatgtcattgatgctcaacttttccgcttcaggtgcagggcgtgaaatcgggacatacggccgcgtgtcgtcttccagctcttcatattcgtctaattctacattctcttccttcaggtcggccgatatcggccgggtcggagacacgatttcatagacgagatggggcttgtcatccccctgcacatagacggactgatgcaggacgctgaacaacagctctgcttcaatatgtttgacaaagtgagccaatgcttcccgcttgtccgcaattgtctccggtcttaacagatcatcggccttcccatggtaagaaaagccggttacttcccctgtcacagccaggtcgatgtaaaacccggtcagcggaagcggcagaccgtcagccatctgaacataggaatatctcacatcgccatcatttgcgggtccgtttttttccggttcaaactcagccaatgcccccggacgatgggtttctaaaaacgcccgcatccgttcttctatgtccgattccgaaagagccggcagatcagtctggaaagccggacgggataagtatttcagttttccgtcccggtctaattcgacaatgatgccggcttccggatcattcttatcttcccaccaaaacagaacctcatcttcctggtattcttccacattactctcgtagcgggcaggtacgtttccgattcggagagccagctgtttcaactcttcttttttcatcataacacttccttttcttccaaaaagattgatgattaccaagactcttttatacaaaactagtataattaacctgtctgtcttcatgactatcgaattaatcattaacaacagggggtaaaccagatgtccatcaaaaaaatgagcgccgtgtttttcattctgcttctcacggcatttaccgccgcgtgcaacagcgaaacgagcggcggccaggaaagcagcacggcgaaagtgaaaataaaagagacggcatgggccgcttcagacgatactgaacatccggccgcgctgaaagtaacggtcaccgtcaaaaatacgggcaaagacccgcttaccgtcaaaagcagcgacttctcgctttatcaggatgacgcgaaaacagccaagaccgataaggaagacttgatgcagagcggcacgcttcatgcgggtaagacagtgacgggcaatctgtacttcacggctgacgaaggcaaatcctatgaattggtatatcagccgcaggcaaaagacgcgaagcctttatcttataaactgaaagtcaaaggcacagcctccaacacaaaacctgacccggcggacgcattatccgcatacattgatgtgatgctgtacggcaagcacaataaagatttcacccgcctgaccggtgtaaatgaaaaaatgacggccgccgcatatcaggaatcggcgaaagccagctttatcgcttctgcaggtatatcacaagaacaggcggattcaaaagccatttccgctattattgacgccatgtcatcagcgcttcgggataacacagagctcaaggtgcataccaagtccatgtcaggcaaaaaagccgtccttgaagcaaaagtgacgccgcttgatatgtctccgcttgcgggccagctgcaagaccgcgtgcaagactatgccggaaagcaccctgatgctgatgaaaacgaaattgtcagccacctgctttctgtctatccggaagagtttatgcgcctcaaaccggcttcttcttctgttacaagagaaatcgagatgaagaaaaacgcccgcggccagtggtatctggatacagacgccgatctggaaggattgacagaagcgtttttgaaaacgtcctgacaacaagaaaggaaatagcgcaggctatttcctttttttattttcacttaaagatgtcactgatatattgaacctcatcctcggttaactgcacatgaagcgcgtccagattgtgtttcagctggtcggggcgtttggctccgggaatgatcgcatccaccgccggctgcgacagaagccatgcgagtgcgatatgcgctgtctgcgcccctttttcctccgcaacggcccgaagcttatccactcgctccagattttggtgaaaagcttctccctgaaacggcggcctgttctttcggttgtcctcaaagactgtgtcttttgtaaactttcccgtcagcaagccggaagcaagcggaaaataaggaataaaggaaatgccgttcttttcacaataaggcagcagatcatgctccgcctcacgctgaatcagtgaatattccgattgaaaaacctctaaatagccgtcggcgttaaactcctgcaattgccggaagctgagattggacgcgccgattgctctgattttcccttcgtccttcagttcttttagcgtgcccgccacttcggagagcggtgttttgccgtcagggaagtggacgtaatacaaatcaatcacgtctgttttcagccgcttcaggctgttttccgcctcactccggagaaattcacggctgttgtccagctcgatttgtccgttgacttctttatgcgcgccttttgacgcaatcacgaggctgtcccgcacgccgcgctctgcgacaacttcaccgattaactcttcggaacgccccaaaccgtatataaacgccgtatcaataaaattgacgccgccgtccaatgctgtgcggatgagttcttttcccgtttcatcattaagattcggaaacagattatgtcctccgaccgcatttgcgccaaaaccgatacgctttacccgtaaatccgtcctgcccagcgtacgtgtctcatccatggctcaggctcccttccttttatcgctctgtttagtattagatagacggtaagaattatcctgcctgagagcctatctacagaaaaaaccttgaaaagcgtttgcccttcaaggtttttttggctgtgtattaagatgtcagagctgcggcgaagcgttcggcttcatccgtgagagcaccctcgatttccttatagcggctggaaatcgttgaggcgctgacgccgtacttcttcgccagcttggcttgagaaacggacgcgccgttcagagaaatgctgtttacgtaatattcgaccgccgccgcgaaagcttcaggctttctgatcgtcggtgtttttttgatacagaacgttttccacagatcaattacggccggaaccagctcagccgggtattcatccccgctcaggcctttttcaatagcgtctgccgtttccttttccatgtcgttggcccactctgtctgtttttcttcagcagcctgctcaggctcttccgccgttcctaaaagagcggccagcacaatgtcgaagttgtcctgcataaagcgctcaggcgattttccttccgcaagagccggggcagccgcctttttcactttgctgattagagcttcggtccgcttcacagggaagatcgtaaattgcatgaagaactccgctttttccgcttcgtggatcggatagccgagaatcaggcttcccgccggcggaagatcctgctggctgacgtccatttccactttgaattgttttttcgtcatcacatcttcaaagtgaatcattccttctttcacatcttcaagcaccataacggcaggtgtcatgcttttccatgattcaacgatttcccgtgttttcgggcggttgatgccgccggcttttttctgaagatattcttcaaaaatcgtcttgccgcctgccagcggacggaagaaaattccccagatgccgaggttgaagactccgatgtcttttgtctgtctgtccagctccgtaatgaacgcgtgctggttaataaatgatgatatgccgtctctatgtgctgtaaaggcgtactccattaggctttcctgaatctgtttcgcttcttttgccgcgatgtctgccggaatggcagcttctttgcttccgcagcattttttatatttcttcccgctgccgcatgggcaaggggcatttcttttcacttttcccacaataaaccctccgaattctgatataactttattattttaacaaaaataacttcagagggcttggtttacggcgaaaaaagaatatggaagaaaaaaagaccccgggatattctcattctccggggcttcgaaactgttaatttgtattttgtccgccgccgttcagaccttctttaatcagcccgtttacttggctgttcatcaaaagtccgatgtgtccgacaccgtgaatctgcacgtttttcccgccgatcagccgtgacagcgggttcaggacgattaagtccgctgagctgtaaatcgatgtatataaaatcttttggttcggatcagtccccggaagcgcccggttggtcacaaggccgttcgctccgcccagtgtgacgacgtttgcgattttgtctccgccgtcaagatttttaatgtaatagagcgtgttggcgccgcccatgctgtgcgcgacgatatcgacttttttcgcacctgtttcgctgagcacttttttcacgtaattggacagtctcggtgcattgtgtctgttgtttccggttttgtccagaaaatcaatggcgtacatctcatttcttgaccagccttgggatgccaagtacgttttgattcccgcgaagttaaaggacgccccgccgattccgtggaccatgacaaccgggttatgctctgaggaggctttcgatacggtcggctggaaggcaaatacggaaatgacggagagcatgcagactgtaaggatcgctaggattttgcttttgatttgtttcatgaactttcctcctgttatgtaattttttgcaattttcattttattagagaagaaaaggaaaaaatagagtattttttactgttttcaacaattgaaaaagaggcggaaaaatgagaaagacgcccctttcccgaaagcacacttatactttaatacggcaaacaaaaaaaggagagaacacccggttctcttctcctagtactcattaaaataggtttgaatccgcttagggtcatgcgtttttgtcagcgcgagcatcagcagaatccgcgctttttgagggttgagagagtttgaagctgtcaaatggtctttttcatacgctcgattaggtgttaccgttccgtttcccgtccttgtggagcggacgaccgccagcccgcttttgaccgactttacggcgcctttatgcgccgcatcagacattgagccgtttcccgggcctgcaaaaataatgccttgcgcccctgattttacggcagcttcaaagagatagcttccgtcattttgatagccgtatataatatcgacttgcggcagtttatcaagtttgtctatcttgaaatctgtatccttcgtatgctttcgggtcatgatgttattaaaatagatgtcatcagcaattgttccgatataacccatttcttccgatttgaatgtgtcggccgcggttgtattggtttttgtcacatagcgcgccgaagcgattctgtcatttaatacgacaagcgtccccttacctttcgcatcaggcgcagccgctgtttttacagcgttatataagttggacggcccgtctgctccgatcgccgtggacggcctcattgacccggcgacaacaacgggcttgtcacttttgaccgtcagattgagaaagtaggcggtttcctcaagtgtgtctgttccatgtgtaatgacaatgccgtctgtatcatcagacttgagcagcttgtttacccgttttgcaagtttcagcagtgtctcgttattcatattctggctgccgatattcacaacctgttctccgctcacatgcgcgacctcttttatctccggaacggcctgaatcagggcatcaactccgattgcccccgccgtgtactccgtagctgacgtctttgaaggagcagcgcctgcaattgtgccgccggtggcaagaattttaacattcggaagtccgtcttttttcgctgaggctgcggctgccatccggggcggtgtttctttcgcttgaggagattgggagcagccggccgcgatgaagagcagagccgtgataaatgtaatgaagggcatgaattgttttttcattcttttctctccttttctttatttatgaagattttcctctcaccggtcaacgcgcttgtcaggcaacctcccgaagaaaataaccgttaaaaaaccttgacaccgtcatgtgaaatcaagataatagaccagtcactatattttaaatttgtcaaaaatcagtaaggtgggaacattatgagctatggagattctcgtgaaaaaatcctcgccgcggcaaccaggctgtttcagcttcaggggtattacggcacggggctgaatcagattattaaagaaagcggtgcgccgaaaggttctctttactatcattttccggacggcaaagagcagctcgccattgaggctgtcaatgaaatgagccattatatccgtatgaaaataaaagaaagccttgatgcccatcctgatcctgcggaaagcattcaagcgtttttacaggacttatcaagccaattcacatgtccggaaaactttgaagggtttcctgtcggtttactggctgccgagactgctttaaagagcgaaaagctccagcaggcctgtcaaagcgcttatcaggaatgggagaatctgttcgcgggcaaattgagatcagccggtttttctgatgagaaagcggcggaaatcagcactgttttaaatgccatgatagaaggcggcatcattgtgtccttagccaaaaaagacaaaatgccgatcctccatatttctaaacaaatcccgaacctgctgaagacataaaatacgagagacatgtacgtatagaaagagaggagaatgattttggaaaacgctcagccttccaaacaatataaagtcatgccgatcatgatttctttactgacggcagggtttatcggcatgttcagtgaaacggcgctgaatatcgccctgactgacctgatgaaggagttacatatcactcctgcgaccgtccagtggctgacgacgggctatctgctcgttctcggtattcttgtcccggtatcgggtctgcttttgcaatggtttacgacgagacagctgtttatcgtttcactcgctttttccattatcggcacgctgattgcagcgcttgcaccgagctttccgtttcttttggcggcaagaatcgtgcaggctttaggaaccgggctgctgctgccgctgatgtttaatacgatcctcgtcatcttcccgccgcataagcgcggagcggcgatggggacgatcgggcttgtcatcatgttcgctcctgcgatcggtccgacattttcagggcttgtgttagagcatttgaactggcattggattttctggatttccctgccgtttcttgtgttggctcttttattcggcatcgcctacatgcagaacgtgtctgacattacaaaaccgaaaattgacgtgctttccattattctgtctacaatcgggtttggcggcatcgtattcggattcagcaatgcgggcgaaggatcagacggctggtcaagcccgacggttatcggttcgctcactgtcggtgcgatcgcgctcatcttattttccatcaggcagctgacaatgaagcagccgatgatgaatctgcgcgctttccgctatccgatgtttgttctcggtgtcgtgattgtgtttatctgtatgatggttatcttatcgacaatgctcctcttgcctatgtatttacaaagcggactgatgctgacggcgtttacgtccgggctcatcctgctgccgggcggtattttaaacggctttatgtctccggtgacggggcgcctgtttgacaaatacggaccgaagtggcttgtcattcccgggtttgtcatcacggccgccgtactttggtttttctcaaacattaccggcacttcaacggccattctcatcgtcgtgctccacacatgcttgatgatcggcatttccatgatcatgatgccggcgcaaacgaatggcttaaaccagctgccgccggaattttacccggacggaacggccattatgaatacgctccagcagatggccggcgcaatcggcactgcggtggcggtcagcatcatggcagccgggcagaagaattatatgagcaccgtgaaaaacccgaatgatccttccgcatactctcacgcgctgattgcgggcgtccagcacgcctttatcttcgcgatgattgtcgccgttatcggcttgatcagcgctttctttatgaaacgggtcaaagtgaatcactcataagaaaacagcaggctccccgtgagtctgctgtttttttatatatcgcgcgcttcagccagttcatcaatcgcatacatcagatcatcggccgtgttatagaaatgaggcgccagccggatgatatgtccgctgggtgcgcatacgatgtttttccgcctcaacagcgcagccgtttccgccgctttttcatcccgtatggaaatcatgccgggtctgtcatcggcagacggcggccctgtgagattcaatcctttttcagaagcgtattcatacgcaaatgcactgagtttttttacttcttggtgaatgcggtctgtgccggcatcgtttactagagataaagccgcctgtgccgcatatatgctgataaatgccggggttccggtctcaaagcgtttggctccgtccgcataagaaaaacgggttaaatccagcatcgacgcccgctgctgcccgaaccacccggtgactttcggcttcagccgttcggcaagttcctttctgacataaagaaacgccgttcccggtatgccgagcatatactttctcgcacccgcggccagcatatcaactccccattcttttacatcaatcgggatgtgccccgctgattgataagcatcgacaaaaagaagcgatcccttctttgcggatatctcggcaatgcgcttcatatcctggacaaaaccggacgtatatgacacatggggcacacaggtgaaaagcgtctgttccgatatgtacgtctcataccgctctaacgggatcattccatcttcagacggcacgactgaaagctccatctcagtctgtgccttcaaaatgtgggcgatcgccggaaaatccaattccgtatacaccgcctgtttctttcggcaatccggtaaagcggaaacgacggcagagacagcagccgttactgaaggtaaaacggcgatttcttcaggatgggcgccgatcaatttcgcaaattcacaccttgcctgctccgttcgtccaatggcttcttcccagtttccgccatgctgaagcaggctttcctgatagtcattgatcgcttttgaaaccggcagggcaagagcgctttgagagcagctggcgagcatcgtatgtgtgcggagcgccggaaataaagatcggtattgcaccagaggcgaattcaagacgtgtttcccccttcggcaggaatatatgtccattatagagtatggtaaaaagaaaaggagggttttatatggagaaaaaagtattgctgacaggctttgaccccttcggcggggaaacggtcaatccttcatgggaagcggtcaaacggctgaatgatgccgctgagggccctgcctctatcgtatctgaacaagtgccgaccgttttttataagtctcttgccgtactgcgcgaggcgatcaaaaagcatcagcctgacattatcatctgtgtcggacaggcaggcggcagaatgcagatcacgccggaacgggtcgcgatcaatctcaatgaggcgcgcataccggataacgaaggaaaccagcctgtcggggaaaacatttctcaaggcggtcccgcggcctattggaccggccttccgatcaaacggatcgttgaggaaagcaaaaaggaaggcattcccgcggctgtatcctacacggcggggacgtttgtatgcaatcatctcttttacgggctgatggatgaaatcagccgccatcatccgcacatccgcggcgggtttatacacatcccgtacattccggagcaaaccttgcaaaagtctgcgccgagcctcagcctggatctcgtgacaaaagcgctcaaaatcgccgcggtgaccgccgcggcgcatgaggacgatattgagaccggcggaggcgaacttcactaagctgcagacggcgcctcggcccatttcttccggtaaacgatgcgggacagcgtcacactgatttcatagaggacgagcagcggaatcatgacgagaaagtcagacataaaatccggaggcgtaatcagcaccgagacgacgatcagcacaaaatacgaaagcttccgcgcctttgccagccgggttggattcacgattccgagccgtgtcagaaacatgacggccagaggcatttcaaacaaaaatccgaacggcaatgtaagattcagcataaaggtaaaatacttgtccgccgtaaataccatgtcaaaatggccggcggataattgtgttaaaaatccgagcacaatcggaaacagcacaaaatacccgaaggaaattccgataataaacaaaaccgaaagccccggaatgtaaagcaaagcggcgcggcgttcaaacggggtcaaagccggcgccgtaaaacgccagagctgaaaagcggcaaccggaatcgttgccgtaagggcgcatattcccgcaatcatcatatatacccataaaatctcgctcggccctaaaacggccagcctgccatccaaatccttgatcagccagtcataaatatcctgcacaaaccagcaggcgccgataaaaaacacgagaaaggcgataacggttttaatgagacgctgccggatctcctctaaatgcccgatcaagtgggtttcttttttatccaatcgtacatcctccttatagagaaagaggcagaagcggattcgtctgcccccatgtcaggattcagcctgccgttttgtctttctcagccgtctgcttgtccggctcttcatttgagaccagtgtttttgcggcgcttttaaattcaagcagcgtgcggccggcggcacggccgatttccggaagctttgaaggcccgaaaatgatgagagcgatgacgaaaatcaggatcaacccgggaatgccgatatttgaaaacatgagtgtgcctccttattgtgagatttttgcccgtttctttctcatttgcttttcatgcgcattgttatgggcgaagaaacgatcctcttccacctcgtttgactgctttaaaccgcctgcaaccgccgcttgagaaaccttccgaatccccgtctggtctttctgataaatgaatgaagcccgcgtggatacctcagcccccggctccgtcacgtacggcaccactctgtaatccgctctccattgggcaggggtcaccgtacagcggacatagccgcggtaatcgttgaaaaacttaatatgcgggttttgttttaagatttgatccgtatcggcccgtttatccgctccgtttcctccagatgtaatggaagtcccgacgaattcggctccgaaaatctttgaattcgtttgattaaaatcggtatgcaggtttgacgcccagcttgcgtgaacatcacccgtcagcacgatgacattgttcaggtttttgctttttataaaattgatgacccgctcccgctgagccgggtagccgtcccatgaatccatgctgtatatcggattggcggttgttccgaaattccattgcgcgaaaaagatttgctgcgccagcacattccacttcgcttttgaggcggctaaatttccgaagagccattgctcctgttctgtccccatcaatgtacgcttcggatctctccactcatcagaaggcggcttattcccgtcgccgttggcctgatcatctctatactgtcttgtatcaagcacattgaacgatgctaaattgccataagaaaattgcctgtacagccgcatatcaggaccgttcggcaatgacatgcgcctgagcggcatgtgttcataataagcctgataagctgcggccctcctgagcacaaacgcttcaacggattggcctttttcagggataatattggcataattgttttccacctcatgatcgtcccacgtcacgacccacggaaatgcggcgtgggcggctttcagattggcatcagagcggtattgggcatgacggttgcggtaatctgacagtgtatacacttcagcgctgctgtgcgtcctgacatttcccgtttttgacacatattcgttcggtccgtattcataaatgtaatctccgagatggaacacgagatcaagcttttccttcgccatatgtttatacgccgtataatagccgtgttcatactgctggcatgaggcaaatgcaaacgtcatggcggatacgtcagcaccgggagctggcagcgttttcgtccggccgacgggactgagctcatgcccgcttttaaaccggtaatagtacactttattgggcttgagcccgtccgcctcgacatggacggagtgtccgagattcggcttggccatttccgttccgcgtttgacgatgtgacgaaaatgttcatcagcggcgatttcccattttaccggcacggcctgcttcggcatgccgcccccattcagcgggtcaggggcaagacgcgtccagagaatgacgctgtcagacagcgggtcgccggaagctacgccgagggtgaacggatagtttgaaaatttcggagcggcattcacttcaaacgcgccgatggattgcgcgatcgctaacccgagggaaagaccggcgattttcccggcgccctgtataaatgcgcggcggtcaaacgtattgttctgaaagcttttgttctccaattccttgatccattcatctaaacggccgtcatgtgtcatgtcagttcccctttcgtctcattgatcgcccttattataaaaaagaaatgttaaaccgctatgaagaagtgtgaagggtttgtaaggctgaaaaatggacggcgggagacatttttcacattgtttcgacaaaccttgccccgccgggagaaaaccccctctgtttctttttggcttgtcatccgtcaagcgaacttttttcctatttttcttcacaagaaattaaaaaaacaccgttcattctcagaacggtgcgcccgggattaaaatgtattgtacacgttttcgcacgtctcacctgtcggctgatagaagcagtgggatttgaatctcgcgacaaacggctgatcataccaagtcggcgggcagtttcccggcggcttaaaataccacagactgaacttagccggccaaaaccgttctccgttaatcgtccggcgggcaagcctccgctcggattcacgcggtctctggtaaaagtatccgtgagtcaccgcttcaaacgcgtgcggctgaaacaccatctgcctgatggtgcgcaggcctttaaaatcagaacaattcgcccgcacccgattgattcccacattgccgaccaaaagcattccctgcttcccttcgccttccgcttccgccctgagcagccttgccattagatccagatcggcgctcgacgcttttacgactgccatcatgacacctcccgtattttctcccttcatcatattcagccgcggcccagtgatgacagacaaaagccagaaaacaaatgttcacgaaaaaagggtttatatttcacgttatgaggaaacatactaacatgatttccataaggaggaattcgcatggaacacattaaagcgcttgccatcaaaggcattatgaccatcattattctgtatctgatactcggcttaggttttcgctttacattcggcgacgtgctgctgatgaccattgtgctgggagccgtttcttactttacgggcgacctgtacgtgctgccgagatggaataacatcacggcggcgtccgctgatttcggaatcgcgtttcttgttgtctggctgatgggaatgccgctgtccatgggcatttccggaggaagactggcgtttgccgctcttatttccgccgtcatcatcgccgtcggagaatattttttccatatctatctgatgagaaaagacttgggcgggtcccgttttttagaaccccggtccgaataacgtaaaaaaggccggataaaagcccctttaaagggggctttttatttgtaaagtataaacgctttatacatcttgatataactgataaacccttttcagcctttcttcgagctgttcaaaatgaacaaagcgggcttctctcagaaactcagtcccatcaatgaacaaaagaagcacgggaacagtgaagcctgaaaatctgccggccacctcttctacctcgtcagcattgatatgccccaatttgatattcggaaactgatccaatacttttctgagctgcggcagaacagcgtgacatactgtacaggcgggtcttgaaatgtagataaaactgaattgatgctgtttaataaaattctcgatagaatctaatgaatgtaattctgccatctctttcaacaaaaccctcctccaatcggctcgtctttcatgaccaagctcatcaatacgcgtacattcactatacacatttatattgaacatatccgcttttttgctattcagagcacctgaacgttgtgcttgaaaataaaagaacagttaccgcttttcagtaactgttcttagatacttatattaaaaatgcaaagcgtacgcccctgaaccgatgagtgcaactccgatggagactgcaatcagcaccaagttatattcaaaaccgccggcaccgttggcaaatcctttcgctccatggacttttacgatggcacctaacataataatcgttataatagcagctccgagcgggaggaaaacacctaaaataaatagaattccgcttgcgagttccccgagacctgataaagcggccgcggcattacctggtttaactccaattgactcgaaccattgtccggttcctttaattccgtatccgccaaaccagccgaataatttttgtgatccataaaacagaaacaccacaccaatcatgattcgaataagtaatagtcctgcatcttccatttttatctctccttatttttcatattatatgatgtctgcaaggcagctgtttaccaacagtcgcttccagcaaacatctgttaaatgtatgtcttgttatttttcttcatgcttcacgttcatctatcaatcaatctaattctctcacttcaaacggcagcagcccttgttcaatttgtgcccggtgcggttcatactgctcagggagcatcagttttccgcccattttttcttgtgactcatcatgggcaaagcccggcggatcagttgcaatctcaaataagatttccccatgttctctgaagtaaaccgcattaaaatagtttctatcctgaacaggagtcacaccatatccgtgcgcagcaatgaacctttgccaatctaattgatcttcgtcatcctgagcccgccaagcgatgtgatggaccgtgccgatacccatttgcccgcggccgataggcgttaacttaaggtcaatcacatttccgatatcaccggcagaacgataacgaacgaagtctccttctttaccgactcgctcaagccccatgatattttccagcaattcacctgttttttcaggctgtgctgataacagggttgcaccgccaaagcctttaatggcaacatccggggttacatctccgaaagtccacgtattggcctccactgcttctctttccacgatttctaaatgcaggccatgcgggtcatcaaattctatatattgttctccaaaacgctcgatttttgtgtatggaatgttgaacttttcaagtctcttttcccaaaacgccatggcacccttcggcacggcgtaagatgtcacgccaacctgtccgtctccaatgatgccttggcgggcgcccgcccacggaaagaatgtgatgattgttcccggcttcccgccttcatccccaaaataaaggtgatacgtacccggatcatcaaaattgaccgtttgcttaaccaatcgcagccccagcactccagcgtagaaatcagcattctcttgagggtgaccgacaattgccgtaatatgatggatgcccatcgtttttttcgccatttttatttgcttctttacaaatagttaaatatactccacaaactcattcacaggctttcggtagccgcgcggccttctgctttctattttttctttcccgattgtaatcatcatgacgacctcaaattgatcatctatcttcaaaatctgtttcacggcttcagcatcaaaccctatcatcggacaggtgtcccagcctttttccttagcactcagcataaacatcatcgcagaaagtgaagcatttcttatcgcctcatctctcttaaatggttctcccctgttttcataaaacgaaacggtgtcttgaaccatgtgatcatactcttgtttatttaatacccccagcatcttcaatccttcatagatgtcagccgcttgctgatatgcctgcttatcccctaaaaccaaaagaacagctgatgagctaaacactttatattgtccgtttgcggcctgtttcagcttttcttttacatccgggtcaagaaccgtcacatattttgtgtgctgcaaattaaaagctgatggagccaacgcaaccaattcaaacatttcattgagctcatctcttgtgattggatgttctggaagaaagttgcttgcagatcttctttcattcactagctgtacaaattcagccatttccctcgcaccccttttatctcgaattcgagatattatagtataaaaaatcaaataacgtatgattaaaaaacgaaacgttctcttcactgatcttttcgtgattcaaacgatcggcaggttcttatactgcactctaattaaattatcttgaattaaaaaatcttgaattcgagataataataaaagataaacactcaaatgtcaacagttctttttttaattcagcgccattttgtctgtgtactgtttagccctgctccaactttttttctgtcaccttatttattaggaaacaggaaacaaccttgctatagacccactcgaaactgaattggtacgataagcaaagtgattacacaagaaaggatacggagagcgaatcaaaagcgcctctatttttttgtgcagttttataggaggaaaaaatgacaagtgaaagagaacaaataagcaaaaaagttgctttgattgcattgatagccaatctgatcttaatggcaggaaagatcttttttggactgataggcgatagtgaagcagtttttgccgacggtatacattctgcagcggatgtcgcggcttcaattgctgtcctggccgtcatcggcatttctaataagccgcccgatcaagaccatcctttcgggcatggcaaagctgaggtcatcagcgaagcgattgtaggaatcatattagtgctcgtttccgtgtatattctgatagaagcgatttcgtcctttgttgaaggtccaagcatcccgcaatacagcgcattgtttgcggctctgatatcctacgcggctaagcagatcttatatcgttattcgatcaaacaaggggaaaaatggaacagtaaagcgattatagcgattgcatacgatcataaaggcgatatcgttgcctctcttgccgcttttatcggcgtcctattggcgattatcgggaacacacgcggatggtcctatctgttgtacgctgatgcaattgccagtgtcatcgtggcgtacctcatttttaagatttcaatggaattaatcaggccgtctgttgacgttctcatggaaaaaagtgttgatcccgaactgatagaggaatataaagccgttattttgcactgccctcaagtcaaacggctcgataaaatccgagcaagagaacacggccactataaattgcttgatgtccggttatctttggatcatgatttgacgattaagcagggacacgatattgcccgcgaaatccgaaatgaaatccaaagacacttttcagatgttgaagaagtgctcatccatgtgaatccttattttgaagaatgaaaaagcagcttgtagagaaaatgatgtttttctacaagcttttttgttttgtgctgtttctttacatattcatttgatttcaggtgcagaaaaagcactcccacatgcctagctttgcttggctgggtatgtggcaatcttcaacatcattttgaataagatcagcggatcaagtgagggggggctttatttttgttgcagtaaggtttgaccttttcaacgatgaaagagaagtctatgtatttatcaatttttcgaagaaggtgatcctcttcgacgagttggtcaaacagaacgaattcggctgtgtttcgagaaaaatttcttgtgtggaacatgagaaagaaaagacaccgttttttcagtctttcttttattttatgacaagagaaacataaaggctgtcgagattttctcgacagcctgaaggccggataacggcctttttcgtttgatttcactgatcaatatgctttctgataaaatgcagcagcgtgtttccttgagcggtcaatatgacgcccttcgcgccgcacttcggacagggcgtcccttccttctcctcgccggttccttcacaatgcggacacgtgagctcaagatcgtcggttgcgatcaccatgaatatccctccttttttgattgtctgtccgtctccagtcactttccatggccatcacctccttaacaatacaaaaaaaccccgtccatcaaaggacgaggttttcgcggtgccacctttattaacggctgataagccattctctcaaaaagtacagaaacacacggtttcaatactcctttcttgataacggggaagaatcccggcaccgcctactgtcatttcagcgcagcaattcagaagcccattcggcaccggacggggatcggttcacagcggccaccgactctctgaaccccgcgcgctgatgcgtacttactcttcctcagcattgttcatccgttcttttattttaaaatgtatcatacgctgtcatccggcggaagtcaataacctttcggatcggtcaggccgagcatgtcccgcgccatttgcatatgctcctcttgccccgtctgaagcgcgaacttcgccgtttccacagggtaagcggcctgccattctgtcacatgctgattttcgtttacaaaaatatgcggaggatgcaagtcgccatggatcagcacggaaaaatcaggccagtacgaactgtcatttatccacgtttgccatcttttccaaagccagcttaccggctgcctccgctgacaaattttgatccttcgcgtaaatctttcgcctccaaaaagaagacgtgaatgaattttttcatattcactttaaccggagaaagcggcacggtttccttagcctgcatttctttcattctcttgctgacagcggggaaatcaaagaatttcgaggcgtaatattcaaatttggggtttgaaaaatcagttgtgcccaatgaagcgaaatggtttaacgaatgaatgacggcccttctgatccgctgttccgaggctttgatttccctgttaacctcggcttgtgccgccgcaggccccagcttccggatggcgacgtttgtaaacatctgctttaaagacgggatgtttctttccgcctgttcatcctcaaataaatagtgaaggacggccatgaggtcatgcgccccgctttctcccacgatgcctaattccgataaaagaaattttcctgtttctttgattgatttctcgtgcatcccccccggcccgctttttttcggctcattccgctgaataagacggcttaacgagtgttggatgtcgccgatcgaggtttccagttcaatccgctcttttacttttcccaaaacggtgacgatctcgattttgttgatcggtttgtggataaagtattcgatgccgagagaataagcttctcccaccatttcctttgcctccacctgcgatatcatcaccgcttttccgttgtacgatccctgaagatgccggatcgtctcaatcccgtcccgacccggcatcagcagatcaattaataaaatatcgacttgtttaaaatggagataatgcccttcaatctggcttccgtcctctgcctcaccgacgacttctcctaagtcctcgtcctcgatcatctgttttaaaatggaacggatcgcccggtcatcatcagctataaaaaaacgcatattatgagttcatcctttctgcaatcaaatgcttcaccggcagtttaatcgtaaatatgacgccttttggcttgttatgaaaggaaatgtctccgtcaagttcagttacgatttccttcacgtaagtaagcccgatgcccgttgaaggtgtgccgaattcatcgtatttggacgtaaacccgggatcataaacgacctctccgattttttccggaatgccgggaccgtcatcttccgcctgaaattcagccttttctccttccgtcctgcgcagcgcgaggcggatctcacccctgtctcccatggcttcgacggcattggcggtcaggttatttaagatcgacaggacggtaaagacgtgataatcgggatgctctccttcaatcacgctccggaattgaatgtccttgcctaaagattcggcgtatttttcattgattcggatgacgatgccgaccagagcggcggcattcatgtaatcccggaatctctcattggaaatcagcttcgacaggccggcgaatattcgctgattgtcttttttcacttcatgaatctctcccgcaaggcgcagcattcggctcccgagctcccggtcgttcccgctcatttcccgatatagctgataggattctttcgtcacatgctccgtcgttttcagcgtttttttcaaatgaatcgtttcttcatataagttggacacaatcatcagcatgtgctcatgctgctttctcgtttgtttttccctgacctgagattcgtgcagcttcatcacgttgaaaaaactcagcacaataaatgtgtgagaaacagcgataaccgcaatatccgccagcttgtccggcatcataatctgccggccgccggaaaactgaaccgtcatttcaacggcatcggacgcaatttcaatgagaaaaccgagaaacccgatcatcagcggccgatcccaaaaaagcctgaccttcagcacataaaacaagcaggcatatgtaaagtaaaaaaagaaactgggatattggctgaaaaaagcctccgcaaagccggcatgctctcctccccagcacgccaggccgatccggaatgccacaacggctgcacctgtcaacagccctgacaatactgccggcacatgccgaagcagcagcagaaaaaagaaaaaagccggggcgccgaagctgatccgatatacctcattcagagggtaaaatttcagttcccccgccagcggcacggtgatcagcataagggcgaaaagatagccgtcttttttcagtaaatagtcgagcctgatcataatcacttccttcttctgtctattttgaacaagaccgatacagtccgcaaatttctttagacccgaatggcgggacactccggctgatttataaatctatcggcttattttaagaatgattttgtcgtattttgtatgattctgtagatgtcattatacattaacatggaacacgctatttttgaaaacgttttccaagaccggtttccgcttcggacaggcttgcaatagaggaggaatgttatgaaagatatggtcagagagcgccttgaaaaagaggaactggcttcacttttacaagattgggtcgagcattaccgaccgttttccgtcaatggaaaaagcgcaaattatatacccgccctcggagaaatcaacgactctcagctgggcatttgcatattagagccggatggctcaatgattcatgccggtgaatggaatgtcccgttcacattgcagagcatctcaaaagtcataagctttattgccgcctgcatgaacagaggcatttcttacgtgctggatcgtgtggacgtggaaccgacgggtgatgcgtttaattctatcatccggcttgaaatccataaacccgggaagcccttcaacccgatgatcaatgccggcgccattaccgtcgcctcgctgcttccgggtgaaacggcgcatgataaattagaatatctcttttccgtttttgaaaaattaataggaaaacggcctcacattcacgaggaggtcttccgttctgaatggcagaccgcgcatcggaacagagcgctcgcctactatttaaaagaaacgaactttctcgaggcggatgtggaagaaacgcttgaagtgtatttaaagcagtgcgccatggagggtacaaccgaggacatcgctttaatcggattgatacttgcgcatgacggctaccatccgatccgacgggaacaggtcattccgaaagatgtcgcaaaactcgccaaagccctgatgctgacgtgcggaatgtacaatgcgtcaggcaaatatgcggctttcgtcggcgtcccggccaaaagcggggtatccggcggcattatggcattggttcccccaagcgccagaagagaacagccttttcataacggctgcggcatcggcatttacggtccggccattgatgaatacggcaacagcctgaccggcggcatgctgctgaaacatatcgcacaggagtgggagctcagtattttttaatcaaacgaaccaagaggtgattggatgcaggaattccttgaaaatgtaatcggctcggcaaatgattttttatggtcaaaactgttaatcgtactgcttctttctctgggactgttttttacgttcagatcaaagggtctgcaagtccgcatgctgaaggaaatgatccgggttttgaaggaaggcgcggccgcccggacaaaaaacaccatttccccgtttcaggcattttgcatcagtatggcggcgcgtgtcggaaccgggaatattaccggaatcgccattgcgatcgcactcggcggtccgggcgctattttctggatgtggattatcgcagtcatcggttcggcttcaagctttgttgaaagcacgctggcccaaatttataaagtaaaagatcaaaacggattccgcggaggcccggcctattacatggaaaagggcctgaagaaacgctggatgggcgcgctgttcgccgtattaatcacactgtcattcggggttgtttttaattccgttcaatccaatacgatcagcgtcgcctttcaaaacgcattcggcaccagccggcttacattgggcattattttaatcgtggttttcggcggcgtaatcttcggcggcgtcaaacgaattgcgaaaatggcggaatacatcgtagtcgtcttggccgttttatatatcggtgtcgctttctttgtcattctgacgaacatcacccaattgcccggcgttctgtcgctaatcgtaaaaaatgcgttcggcattgatcaggcagcgggcggcgctttaggtgcggccttgatgcaaggtgtaagacgcgggattttctcaaatgaagcgggtatgggaagcgctccgaacgcggcggcgacagctacgacgagccacccggtgaaacaggggctcattcaggcattcggcgtcctgacggatacgctcgtcatttgtacaagcacggcgcttatcattttattttcagacgcgtatcaccagccgggactgagcggcatcgcgctttctcaggccgccttgagcgatcatgtcggcgcatgggcgtcaggtttccttgccgtcttaatgcttttgttcggcttcagcgctctgatgggcaactattattacggagaaaccaatatcggatttttaagccagaacaaaaaatggctgttcatttaccgcatctgcgtgctcggaatggtactgttcggctgtatttccaaagtccagcttgtgtgggatatggctgacttgttcatgggcttaatggtggtcgtgaacttaatcgcgattttccttctgtcgaaaaaagcgtttgccgctttgagcgattatgtccggcaaaagaaagccggaaaggaccccgtcttttacagagatgtactccctgatgatgacgggatcgactgctgggagtattcagacatcgcgaaaagtgcgaaaggcaaacacatttcctaaacaaaaggtgttcgggcagcgtcctgaacaccttttttctgccggttcattgacaaagagaatagcgtccattaccctttttatatattttcagtaaagtcagaaaggaaggcctatgaatcccattacacaaatattaaatgaatacccggttatgatcatagacggcgcgatggcaaccgagcttgagcggatgggctgtgatttacatgatgatctgtggtcggccaaaattcttttggagagaccagaactgatcaaacaggtgcatgcagaatattttgccgccggcgctgattgcgcgatcaccgccagttatcaatcgacaatcgaaggatttgcagcgcgcggcatcccggaaaccgatgcgatacgtctcattcagacatctgttgaacttgccgcacaagcacgcgatgaattttgggcgcatgaagaaaaccgtttacaccggcccaaacctttggtcgccgcttctatcgggccttacggcgcgagcctcgctgacggctcagaatatcgcgggcattacggactgacggaggatgagctgatcagctttcaccgcccccggatgaaagccctcatagaatccggcgccgatcttttggcctgtgagaccattccgtgcctgtcagaagcaaaagcgatcacaaggctgctggaggaattccccggcacttatgcatggatcagcttcagcgccaaagacgggcggcatatcagcgaaggcacgcctatttccgaatgcgcggccctgcttgactcctgcagccaaatcgcagcgatcggcatcaactgcacaccgatcgaacatattccgccgctgatagaagaaatcaaacgggcagcatccaaaccgattatcgcctatccgaactccggtgaacaatatgacccggtgacaaaaacctggaaaggcgcagcgtgcgaaaaccatttcggaaaaagcgcgcaaagctggtacgaaaacggcgtgagcctgatcggaggctgctgccggacgaaacccgcggacatccaagccattgccgattgggccaagaccttaaaaacaacttgactaatcggaatagtttgtatattctattcaaaaagccggttcgccggaatctcgtgccgttcgccggcatgagattttttattagaacggctctcgcagaaagttggaaaacaatgaacaacaagaacgagacgaattttcagagaagtatgaaaagcagacacctctttatgctatcactcggaggtgtgatcggaacggggctgtttttaagctctgggtataccattcatcaggcgggtccggcgggcaccattttcgcttaccttttgggcgcgggcatcgtctatcttgtcatgctttgcctcggtgaactgtcagtggccatgccggtgacgggcgcattccacacctatgcgaagacctatatcgggcccgcgacgggctttacggtcgcatggctgtactggctgacgtgggcggtggcgctgggctctgaattcacggcggccgggcttttcatgcagcgctggttcccgcatacttcagtttggatgtggagtgcggtattcgctcttttcatctttttattaaacgccttctccgtgaaattttttgctgaatcggagttttggttctcaagcattaaagtcttagccatcttactgtttattttattgggcggagcggcgatgttcggcatcgtcccgatgaaaagcggtgaggccgcacctatgctgtcgaactttacggatggcggcagcctttttccaaatggctttttcccgatactgatgacgatgctttcagtaaacttcgctttttcagggacggaattgatcggaatcgccgcaggggaaagcgccgatccggaaaaaaccgttccgcgcgccattaagactacagtctggcggctggcgcttttctttatcggaacgatttttgtgctgtcagggatgatctccatcaaggaagccggtgtgattgaaagcccgttcgtcacggtatttgacagagtcggcgtgccttatgcggccgatctgatgaatttcgtcattttaacggcgcttctgtctgcggccaattcagggctgtacgcgtcatcacgcatgctgtggtccctgtctaaagaaggggagcttcatcccgcctttgccaggctgacctctaaaggcattccttttaacgctctgatcttcagtatgatcggcggcattctgtcgttgttgtcaagcgtatttgcagcggatacagtctatcttgttctcgtctccgtctcaggatttgcggtagtggctgtgtggatgagcatcgccgcatcgcaatttttgttccgaagacggtttcttacagaagggcaccagctttcagacttgaaatacaggacgccgggatatccggccgtaccgatagcggcctttctcctatgcctcgcctcctgtatcggcatcgcttttgatccgaaccaggccatcgccctttattgcggaattgcatttatggccgtttgctacaccgcttattacttgaaaaaccggaaaagcagagcccgcgtgcaagccgtaaaatcccaataaccaaaaaaagaaccctgcagcgcaagggttcttttttcatttatacttcaaccacccatctgaacgaatcccgcaccttcccgacttggatgccggcaatcgtttcatagagcctttctgacacttcaccgatcaaaccgttattcagttcaatcgttgctccgtgaatgtgcagcgcgccgaccggcgagatgacggccgcggttcctgtaccgaatacctctgacacctcgcctctcatcgcagcctcatagatgtcatcaatggcgacctgttcttccctgacgcggatgccccagctttttaacagctctatcacagatgcgcgtgtgatgcccccgagaatgcttccgtttaacgccggcgttacggcctctccgtttatgatgaaaaagatattcatactccctacctcttcggcatatttcttttccaccccatcgagccaaagcacctgatcataccccagttcttcggctttccgctgagcctgtaagctggccgcataatttccggacgttttgacgtcgcccactccgccggtgacggcacgcacatactcatcctccacataaatccggatcggtttcagctgatcgccgtaatacgaaccgacaggcgtcagaacaaccatgaacttgtaacgctttgacggccggacgcctaaagaaggctcagtcgcaattacaaacggacggatatataaagaggttcctttttctatcggtatccattcctgctccagctccaccaattgtatcaatgcctccagcgccagcttctcgtcaagaggcggcatgctcatccgccgtaacgatttattcagccgttttatattttggtcaggacggaacatcaacacccgtccgtcttctgacctgtaagccttcagcccttcaaatacggcctgcccgtaatggaaaaccgatgcggaagggtcaaggcggaccggttcataaggggtgattctcggatcatgccaccctctctcctcttcgtaatccatgacaaacatgtaatcagtgaagtacttgccaaaccccaatgaagcggagtccggtttttcttttcttgctgtgaccttacgtctttcaatcagttgattcaacaaaagcacacctttcttttaattgttcaaattttcagtcttttataagctgcctgttttctctgcctgaatcgtgtatgcacagatatatgaggatgcagttgaccgtatcatatcaaatataccacttataagaggataattatcaaaatttttgatattttcaagcgaaaatctaactttattttattctgcttgatttttttcaatgaggactttctgtcatattaaatgattgcgcttacataatgtaaagcaatcctttctttcgcacagtcaataatgtgacaaatttatggcgaataggaaggtggttgccgcctgcttcacgaattacgtatgaaatgcgcaagtaaaagggggattcgcttgaaaaaatttatcgcattccagattttgatcgctttagccatcggagcattgatcggccacttcttcccggatttcgggatggcgctgcggcccgtcggagacggatttatccgcctgattaaaatgattgtcgtgccgatcgtgttttcgaccattgttatcggagccgccggcagcggcagtatgaaaaagatgggcagtctcggcatcaaaacgattatttggtttgaagtgattacgacgcttgttctggcgctcggtctgttattggcgaacgtgctgaagccgggagtcggacttaacctctctcatcttgctaaaaaagatattcacgagctttccggctatacggaaaaagtagtcgacctgaaacaaatgcttcttgatattatccccgttaacatcattgacgtcatggcgaaaaacgatcttctcgccgtcatttttttcgcgattttattcggtgttgccgcagccggcatcggcaaagcctccgcacctgtcatgagtttcttcgaatccacggcaaatattatgttcaagctgacgcaaatggtaatggtcaccgctccgatcggcgttctcgccctgatggccgcctctgtcgggcaattcggaatcgcgcttttgcttccgatgctgaagctgatcggcactgtgttcctcgggctgttcctgatactcttcgttctgtttccgatcgtggggcttatctttaaaatcaaatactttgaagtgctgaaaatgatttgggatctgtttttgatcgctttctccacgacaagcacagaaaccattctgcctcagctgatggatcggatggagaaatacggctgtccgaagcgggtcgtctcctttgtggttccgtcaggtttatcgctgaactgtgacggctcaagcctctatttatcggtgtcctgtatttttctggcgcaggcgtttcatgtggagatgccgctttctcagcagcttctgatgatgcttgtgctcgtcatgacaagcaaaggcattgccgccgtcccgtcaggctcactcgtcgtgcttctggcgacagcgaatgccgtcggtctccccgcggaaggcgtcgccatcattgccggtgtcgaccgcgtcatggacatggcgagaaccggcgttaacgtgcccggccatgcggtcgcctgcatcgtcgtgtccaagtgggaaaaagcattcaaatataaaggacccgtcacggcagaccagaccgcccggacagaaagtatgtaaacacaaaaaagaccaccttattggtggtcttttctattaatcaatcgccgcatgatcctcttgttcaatcaaagcaaggcgttcattgatttcttcctgagtcatttcgtgctctttcacatacatgttgcgttcgttcgtacggcattcgtgactgcagctgcgcatgtatttgtattcattctcaggtgtgcagatcatttttttattacatgccggatttgcgcagttcacataacgctcgcacggctcgcccgtgaaataatcttttccgatgataacgtgctctacacggttgaccggtacgctgattctttcgtcaaacacgtagcactgtccgtcccacagttgccctttcacttcaggatctttaccgtaagtgacgataccgccgtcaagctgggacacgtcttcaaagcccttcttcagcagccagccggaaaatttttcacagcgtacgccgcctgtgcagtacgtgaggatttttttgccttcaagcatgtctttatgctcttcaatccagtccggcagctcacggaacgcctcaatatcaggtctgaccgctccgcggaaatgaccgaggtcatactcatagtcgtttctggcgtcgatcacgatcgtgtcaggatcctgcatttgctcataaaagtctttcggtttcaaatgcttgcccgtcgtgacattcggatcaacatcatcttcgagacgaagcgtcaccaattcttttttatggcgcacaaacattttgcggaatgcatgtccgtcagcctcgtcaattttgatcggcatgtcggcaaagcgcggatcagctttcagtgcattcatgtattgatccgtctgttcaaccgttccggacaccgtaccgttaatgccttcctcagaaatcaaaatacggcctaacagaccgagctccttacaaaacttcaaatgctgagccgtgaactcctcaggctcatcaatctttacatatttataataaagtaaaactctatattgtttttccatgatttatacaccctgttcaattatattaatgatcgcacactctactatatcatacaggaaaacgggcgaaagatgaacatttccgtccgtactctttcttccagtcacgcttcgccttttaaaacctgctgaaaataaaaccgatacgtattgcgcaaaaaggtctcaagcgaaaggccggccgcggtctgatacttgccgataataaacggaaaacggtcacggccttttgcccgcaaaagatcggcgctgtcttcagccagttctgagatgagcgcctcaacgacaggccggcatgcgtcccgcacggcttcaagaatttgctgatcccctgtatgctggtactgttctatcagctttgccaaatccttttcttccataatgttcacttccttacaccatataaaaaagaggagcagcttttataaagcggacgcctcctcctgtgactccgcataaccgatgatctgaccgacctgtaattcacggccttcagtcaggttatccgaaggggtaaacatatctttctcgaatactaaaataacggtcgatccaaatgaaaaatagcccagctcttcccccgtctcaagcctgtttccggtgtttgtctgaacgatcgagttaatattcatcgcacctaccggaatcatgagcatctgctggtcagcacgggtcagctcgtacacataacggtaattttttgagagcacgtctttcccgtactttaaccccatcgtattaacgggataggagcgtttccccagctcggccagcttctgatacgtgcagctgacaggagaatggaagcggtggtaatgtctcgggctcaggtaaagcacggcaaaacacccgccgttatacttgtgatcggcgcttttaaaccccgtcagttcggcgaacgaataatccttcccttttaccatgaaagtttgattgggtttaatcatgccaaccgtctgaacgacaccgtccaccgggctgacgatggcgttcttctcttttgccacggggcggagatttaaattaatatcacgaatgaaaaatgacgccaatgaatcaaagtcagaagccgtgcgttccgtttcattccagttgatgcgatagtgtttggaaaacagcggaatcatcggcttgctcagtttcgattcacagaagtttttaatgagataagacgtcaatcgattattagtcagttcaatcaatgaacggtaaagaactttagcggcagtattaaacattgattactcctatgaattttcctatagtaataaaaataaaacaccataaaaacgctccgatggcggcgaagcataagtaggttttgaattccattctgccgattccggaaaagtagcaggtcacgtgtctgatgccggggatgaaataacctaaaataatggtgtacggcccgtacttcttcatccacctgtctactttctccatcctcttttccttcaggccgacccatttcccgaacttattaataaacggccggccggcttttctgccgatgaagtagctgataatcatcccaaggagcgctccgataaagctgatcagaatggagagcccgtaattcagcacgtttaaatgagcgaagtagcccacaagcgtcatcatgacttcatccggaataggcaatccgataataccgagtgtcagcataagaaaaatcgcgatatatccgtaatcggatattaattgctgaactaattccatcttctgctctccaggttttcaggcgcctgttttttaaagtgcggaaatttaatgttgctgaccattaaataaccgagcgcgatcgttcccgcccccagaagaaaagcgttattgataaagctcaaaatgacaagacacatacccgcaaacggaatcggcatcccgataaacgtcggcagcttgctttgttcaatattaaatctcgaaagacggatcatcccgcagatgctgtaggaaagcgcgattaaaattccgatgaacggaatcgtatatagtgaaacactgtaagcgagcatggacggcgctacgccgaacgtcacgagatcagcaaaagagtcaagctcccttcccatctccgataccgcgttcagcttacgggcggccaaaccatcaaagaaatcaagaaacatcccggtgaaaataaagatcaccgcagagtgtatattatgatacaaaagggaatgaatcgataagagcccgcaaataaaatttccaattgtaatcatactaggtatataattcacagtttacacaaacctccaattaaaaccatatcaaatcggactgcgtatgcataaaggctccattttacggaaacataaaatgaaattctttcaatgctatcattcaaattcttttattatacagcatttggtgttatttgaacaatctaatctggtgatttttgttttttcgccgttcatattaaggtaagcaatcatggattcctctattccggattaccctgcttcaatattccatgccgcgatccggattgtccgttcttgatgaatgaaaagccgtatgatgtattgttatttccttctccgtgaaatgagaacattacatataacgattgcggacataaaaagtttcatgaattaaaaagccggcacaaaacggcctcatacattatctcacaaccccgttttccagtatatagtctgccaaacaaaaaaggcgccttaccattacggtaaaaacgccttttaagatcattttatgtaattgataaatgactgagtgcttcggccgctctttctctggcttcttcaacggtctcagctgcagaaagcgcaaccgccatacggcgtccaactttcgtgacgggtttaccgaatacgcggacctgagtgctttttacccccaaagccttctccaaaccttcaaccgcataatcagcaagctcttttggcgccttcagcggacggcttgcccccggcgacagctgagtgatttccggaatcgggaatcccaataccgcgcggacatgcagcgcaaactctgacaaattttgcgttacaagcgtaacgagccccgtatcatgcggacggggagacacctcgctgaaatatactttatcttcagtaaggaaaagctccacaccgaacaaaccgtatccgccgagctcgtccgttatgcttttcgcaatgtgtttcgcctctttgatctgctgttccgtcatatgatgaggctgccatgattcaatatagtcaccgtctttttgttcatgtccgatcggcgcgcaaaaggacgtaccgttcgccgcgcgcactgtcaaaagagtgatttctgactcaaatggaatgaattcctcaacgatgacccggccgtttttcacccggccgccttccatcgccatgtcccagcagcttttcagcccggaagccgagcggcacacgctttgcccttttccggaagagctcatcagcggttttaccacgcacggaaagccgattgtttccgccgcttctttaaattcttcatatgtattcgcgaattcatagccggcagtcggaagatgaagcgtctctgccgcaagccgtctgatgccttcacggtccatcgtcagctttgccgcacgcgcattcggaatgacgtgaaaaccttcttcctcaagcttcagcagctcatccgtcgcaatggcttccacttccggcacgatcaagtccggtttttctttctcaatgacttctctgacctgcgctttatcaagcatatcaatcacatagcttttgtgcgcggcctgcatggcgggagcatgctcatagctgtcaacggctacagtgacaaccccgagccgctgcgcttcaatgacgacttctttccccagctcgcctgatcctaataacaacatcttcttcgcctgatacatgtcctttggccctccctttctataccccactcattataacggaaatattcaaaaaataaagacaagatagataacaagctctatcctgtcttttgcgctgattcgagcgattcaatcgcagctgacacgtccttctcgcgatattgccccattaagcataacgattcttccgcccggcaggcgtgagaagcaatgcggcgcttggcttcctcatggttgtcaaggatgccgagatcacagagactgacggggaaaccgagccggcggtaaaacggaagcagctcttcaatctcaggtcttcgattctcaagcgcgagctgcaccaatatgccgtaagcaaccttctggccatgcagcacctgatgtgtctcctgaagaaaactgagtccgttgtggaccgcatgcgcccctgccatcctgcacaaacggccgccatacccgccgaccgtccccgcaagcataatgatcgtttccgccgtatggatgaacggcacggacagctcgcctttctccatgcttccgacggccgcttcactgtaacgcaataacagattacggatatattccgcctgtctcagccccgcctgcgccatcagcggcgccgcctcctccgtatttctgatgaccgcctcggcctcataccatttcgccagcgtatcaccgatcccgcttttcatatattcaatgggagaggaaagcaaaaacagcggatcaacaagcgtcaaatagcttgaacgcttatgataatcaactctgataaaattgccgctctcatcatatatgacactcaacggcgtacttgccgcacacgtccccgcaatggaaggaaccatcacagcttcaatatcaagccggtctgccgccgcttttgccaaatccaaaatcgtgccgcctccgataccgatgatcacatccgcgtctgccgcctgctcacagaccttacgcaccgcctcaggtgaacagtatcctttatgctgaatcacatcccaggaagaaccgccgctgtaatcggagaacgcctgataggatttgattccggtcacaataacgggttttctgaatgtctccagcagccccggaagttcttttgcgattccttccttgcatatgtactgattcgggccgcttcggacgatatcttcaggcttcattcgaatctctcctttggctggaatttatatatattttcccacttgtcagaaaatacatcaaccggaggtgcgtcagcgcttcgcttcttccgcctccaaaaacagctcatcaagccgctccaaagcttctgccttttcaaaactgctgaaccacagatcatcataggaatcaaggatgcggtaatggtgggaaatcaaatgctgctgcaagcggaactcgccttttttctcgatggctttccaccacaccttgccgcccatcgtcttccccttcggcctgtcaattgtgcggtgagcaaccgtttcaatgacttccagcggatcatctcctaatacggattgcagtgtttcacttgatctgaaaagcgcgcaaaccgccacaacgtgcggccattccgcaagcgcccgccctttctcaatctgcaccagcgactttttagaaaggccgatcacatccgccattttctcctgtgtgtagcctctctccgaccggattttcttcagctggactgagacaagctcagtcatataatcttgatccatctcaacctccatatttatcaatatagccattttacaccgcggcacgccttttttatatcagaacattttcaaacgaatcaaaagaacccgggattggcttatcattgaagcgatgtacctttccgcataatccagaatgatgcggtgaaatacaaacgtacgcccgaagagacaggtgcaggctccctggcggttgagctccggacaaaataaaaagctgccgcagctgcagcagctaaaactttatagaccggaagatcagcattatgaagcgaatacaatccatcttgcactataattgacacgttttttcgaaccctgattgaccattttaaatctgtatgaatcccctttttttaacgaaggtgtttcaaaataagtcgtaccatttttctttgcattggcggttttgattgttttccaggcacctttgccgttgacttgcttttggacgtatattttatacgtgcccttccctttactgttggatttaaaagtcacggctctcaaggtgtacttttttgtcgttttagtgaatttagggtgatatgtattgatcacatagttagtgaaatacccgcttttataagtatgaagccagtctttagcctctgctttttgcggagaagaaaaacccataaaaccaattccgctgattaaaagagtaaaaataatgatgagcgacttaaaaatctttttgcttttcatcgagaaaatccttccttcctgtaactatttaccctatttatgttaatgacaatatagccaatcataaatccgtccaactaaccattttgaccgcaggaagagatgtgaacagcccttaaaatgactatatgactactacttatgattcttgtcatttttgattaagtgataaagttactttaaaccgctattcattttgttgtttttgtatcaattgtcatagcgaggtcttttcctatcaatgcctctctttcggcgtttgttctgctgccgtgatggggctctccttggataaacccctgcacccatgacaaactgtcatacgtttgccacctatgaatgaacgcacaatacacataatggagggattgcaatggacgaaatggtcctggaaacacaacaatggctgaatgagacgtacaaaggcagacacgggtacaacaaagtgccggaaaacggaaaaacgggctgggataccatttacggtctgacacgggcgcttcaaattgagcttggtatttcagaacctgccgataacttcggaccgacgacacaaagattgtttaagccgttgaaaaagcaggctcccgattctaagccgacaaacatgaattacattctgcaaggggcgctgtggtgtaaaggttttaaccccggcggattttcaggcgttttctatgaaaataccgaaagcgctgtaaaagagtttcaaaaagcggccgggctcactaagcaagacggcatcgtcacggcactcattatgaaagccttgctggatatgagcgcttttcgattagtagcgggaggcgacaaaagaatccgccaaatccagcagaacctgaaccgggattacaatgactacatcggcttgatgccttgtgacggcttatatgcccgcgatacaaacaaggctctcatttatgccctgcaaaaagaagaaggcatgagcacaagcgtcgccaatggatttttcggaaacgggacgaccagcttatgccctaccttgactcccggcgattcacggacaggctttgttttgattgtccaatacgcgctttactgtaatggggaagcgtttgatcccggtgaattcgacggaaaatacggcgtcggcgttgtatcggcagtgaaagctttccaaaagtttatgtgcctgccgcagaccggttatgcggacatgccgacgattaaagctttattatcaagctccggcgacacaacgcgggctgcttcagcttgtgacaccgctgccattttgacggcagatacggccaaaactttgcgtgagaatggctataagatcgtgggaagatatctgaccgggaatgtgcggacaagcagcggactgacatcgaaagcgttaacgtcaaaagaactttccacgattttcaatgccggcttaagcgtgtttccgatttatcaggacggcggctatgaatcttcttattttgtaaaagaccaaggaacgagagatgcgtacagcgctgcatcagccgcccgaagattaggttttccgtcaggaacgaccatttactttgcggtcgattttgatgcgtatgattatgaagtcacggataaaatcattccttacttccaagaaatcaagtcagcttttatgaaaatgcaggcgttctctactgcgccgaaatatgaaatcggggtatacggaccgagaaacatttgtatccggacgtcagaagcaggtctgaccaaatatagctttacggctaacatgtcgaccggattcagcggcaacctcggatacccgatgccgaaaaactgggcttttgatcaattttatgaagggacaatcggaagcggagcgggaaaagtcgccattgacaaagacggatactccggaaaagactcgggtgcaagcagcgtccatccgccttctgatcctgtgtatgatgcaagactgcgcacgctgacggatattttaacaaccattcctgctttagaaaatatatcgaatcttgcgaatgccatgtttgaattcgacaagacagaaaccatttatgcatcacctgaaatggatattcttttatctacttcacttttggcaacagttccaagcgaaggttctcccaacacagttaccattacaaatggcaaaccgggagcctatattaccggtctgatgggagattcacaagtctcttttacagcatcacaaattgattcctatcaaaacctgcttaacagtctgagcttgtcagtccgcaacggttatttagaagtgtatgtcaatccggctgcgggatcgctgaatattcaatttaaaatttatacacctgatattccggtcggtgacagtgctacaactggactaacaactaccattacatttaaaataaaacaaaagagcttcaggttgccggattccgaagaagtgtactctccggattgggattctgtcgtgaataccatggctattgcaggcgcaggaattattgttattgtagggatcggtgctttagtcgttttagcacctgaattaggaggagctgcagccttgttcagcacggttttatcactatttctataattgaacaggcagctccttgctccaggaatgctcaatgagtattcttggagttatttctaaaggaggattcgcatgaagattgatatgcagacatacaaggaaaccgttcaaaaaatagaaaccgatttgattccgcgaagtcaaaatgacgaagaactgcttacatacttaatgaaacaagattcgctcacactgaatcaaatgaaaatgtgtctcactgaaccgcccctcaccttccaacatactgtcaaaatcgtatgtacagtcacattcatcacgttatatatcttttttttcagcactcattttaatgatttgattgaaatggctctgcagatggttttcggcctggccggccttgtttggattattgctgtatttccgttttcaagaaaaatccaagtgtctgaccgtttcagacaaaaatctgaaaacacccgtatcaccggaatgatagactttgtcctcgaacaacgatacaaagacatgatcagttaaaacccctctgcttaaggggttttttattatgcaatcccttcaccccccttatcaaaaaaggctcttctcctttggaaataaccggaacacccaatttcgttttcaatataatgaggtagtggatccgcaaagaaagaagggcgacatgatgggtatcattaatggcaaaatgttcattgaccgattaaatcagcttggaaatgagatttggcttgatggtgaaaagatcgagggacagatttctgagcatcccgcatttaagggccttctggaaacgaagcgctctctttatgatttgcaaacgaaaccggatatgaaagatcaaatgacttacagtcttcccggtaaaaaagaacgggccgggctttcatacctgcagccgaaaacgaaagaagacgtaaaaagaagaagaaacatgttcgaacattgggccagacacacgcacggaatgatgggacgaagcccggattatatgaataccgtgctgatgagcttcgcctcctccgccgcgcttttgaaagaccgcgagcattgttttccggaacatgttcaagcgctgtacgaacgcgctgctgcacaggatctttcttttacgcacacgtttatcacccctcaggtgaatcgttcacaaatgggtgtaaacgtatcgccgacacctatctcggcaaaagtcgtcgataaaaatgaaaaaggcctcatcatacacggcgcccggattttagccacacaaggcggcctgacggatgaagtgctcgtggtttctctgcctaaaatgtattttgaatcggatgaagcgttcgctttttcaatcccttccaatacaaagggagtaaaattcatctgcagggaatctttcgtactcggcaaatcatcgtttgattatccgctcagctcaagatatgaagaaatggattctatcgttgtatttgatcacgttttggtcccttgggaacgcgtatttttttataataattacgaggcggcttttgattttaatatgaaaagctcttttaacgccttcgcatttcatcaagtcatcacgagacaaattgtaaagacggagtttctcctgggcctcgcccaaacgcttgtcgaagcgatagatgtgggcgaatatcagcatattcaggctaagatggctgaaatcatcaccggtctggaaacgatgaaagcccttttggaaaagtcggagaatgatgcggaaacagatgaatggggttatatgcgtccgagtgtcactccgcttcgtgtggtcagcgcgatttttcccgacatctacccgcgcttcacggaaatcattcagctgatcggggcaagcggaatggtgactttgccgactgaaaaagcgttccgttctgacatcagaggagaccttgaccaatatttgcaggcggccgaattgaacgctgaggaccgggtaaaagtgttccgcctcgcatgggatttgaccatgagccccttcggaacaagacagacacaatatgagcggtacttcttcggtgaccccgtccgcttaaccagccatctgtacagaagctatccaaaagaagaacagaccgcggtcatcaaggaattcctgcacattcataaataaaacaaagcagagagcgcatctctgcttatgatagctggatcggctgccgccgatcctattttttattttggctgatcaccaccatcgtaatatgcgataacgcgaaagagacaagcgtatacacaacggcccacccgataaacgagaaattcaatacggtaaaggtgcatataaggcaaacggccaaagcggcagccggcataatgaacgcgtttttaaacaggtacgttccggcgactgacaagatgatgatacaaagcggcagaacaccgaacgcaaaatccaattcatcaatcaacagatgcactcccttcgcttttcttagtccggcctaacacatcttatgcctgagtacaaaatcgagtacttcaaatctttcgcgctccggctgattttccctccggttatttattcaaaaaaatgaaaactttccttaaagcgtttacattcacgtcagactgtgataatttaagaaagcgctatcatacacaagttaatgatttttggatggagatgaggagaaccaggaaaccccgccctttcacaagggtgatttctggttctttttgtcattttcaaggaaaggagtcatacatacatcatgatagacgttcagcaaaggggaggatatgatgtttcaattgtttaagccggctccgcatattgagagattggatgattcaaagacggatgcggcctataaacggctcaggctgcaagtatttttggggattttcatcgggtatgccgggtattatttgcttcgcaaaaactttgccttcgctattccttattttcaggaacaagggttttcaaaaggggaacttggcttggtgcttgcggccgtatcaatcgcttacggcttcagtaaatttattatggggatggtgtctgaccgctgcaacccgagatatttccttgcgacaggtctgtttttgtcaggtgtcgtaaacattttatttgtttccatgccgtgggtcacgtcaagcgtgacgattatgtttatttttatgtttattaacggatggtttcaaggaatgggctggccgccttgcggacggacgatggctcattggttttccatcagtgaacgcggaacgaaaatgtcgatatggaatgtcgcccataacataggcggaggtattctcgccccgctcgtgactctcggcatcgccatgtttgttacttggaaaagcgtgtttttctttccggcgattatcgccatcgtcatttcatttgtgattgttcttctcgttcgggacacgccgcaatcctgcgggcttccgccgattgaagaataccggaatgactatccgaagcatgcgttcaaagaccaggaaaaagagatgacgaccaaagaaattcttttcaaatacgtgctgaataataagtttctgtggtatatcgcatttgccaatgtctttgtttatttcgtgcggtacggtgtcgttgactgggcgccgacttatttgacggaagcgaaagggttctctcctgaagattccagatggtcttatttcctttatgaatatgcgggaattccgggaacgattttgtgcggctggatcagcgaccggtttttcaaaagccgccgcgcgccggcaggcgtactgttcatggccggcgtatttatcgctgtattggtctactggcttaaccctgccggtcatccgctcatcgataatatcgcgctgatcagcattgggttcttaatctatggacctgtcatgctgatcgggcttcaggccattgaccttgcgcctaaaaaagcggcgggaacggcagccggcttaaccgggtttttcggctacatcggaggctctgctttcgccaacgccatcatgggttatgtcgtagaccgctttgactggaacggcggctttatcatgcttatctcctcatgcgtgctgtccatcgtcttcttggctatgacgtggaatacgggcaagcgggcggagcatgtgtaagaaaacaacataaaagattaatatttttgcagtacagcatttacaacgattttctacactagagacagatattgatttttaagggggaagaaaacatgcggaaacataaattgtttgctttggtattgctttcattcggtttattgtcattcatcgtcacgcctgtatcagcggcaggaaaaggaaacctcttgtctcctgacagaattttgaccattgcccatcgcggtgcttcgggatatgtcccggagcacacgatcctttcttatgaaactgcgcaaaaaatgaaggctgactatattgagctggatttacaaatgacaaaagacggcaagctgatcgtcatgcatgatgaaaaactggaccgcaccacaaacggacaaggctgggtgaaggatcatacattagccgagattcaaaagctcgacgccggctcttggttcaataaggcctatccggaaaaagcaaaaccgcaatacgccggacttcgcgttcccacacttgatgacgtgttaaaacggttcggcagacatgcaaactattatattgaaacaaaggcgcccgaaacatatccgggtatggaagaaaaactgatcgcttcactgaaaaaatacaaattggcaggtaagcatgcgaaacttggacaagttatcattcagtctttcagcagggacagccttctgaaaatcaaacagctcgatccgaaacttcccgctgtccaattgcttgaagcggaacagatgacgtcaatgactgacgcagatttaacggacattaaaacatatgccgtcggtatcggaccggattacaaagcgctgaacgctcaaaatgtccgaaacattcgcagccacggccttctgcttcatccttacaccgtaaacagcgaggcggacatgcgccgtctgctgaattggggcgtaaccggtgtgtttaccaactatgcggatatattccaaaaggttaaaaaagaatacaaatcataaagccacatgggttcggagatgatgccgagcccatgttttttgcccgataatgcaaacgccatcatgggttatgtagcgggcggagcatatattaaagcttacattcacctttatattaattaaaggtatcactgtaattgtgaattacctatgataccttacaaacaaaaggatataattatttatttctattatctattttctttcttatactatttgtaatagacgataatacaagtgatactaaaccatagacaaccacccatccccaaaaggatagattaaaaacagtaaacattagtatgacagaaacaactatactgacaagcggcattatatacacttttttgaaaatataagtgaatataatcgataagacgataatagaaagtggtaaaataccaaaagcaatatctagctcatccattattattctcctttgtgaatttaatttctccctttaaatatactcactcagctatctagcgatttaaaaaatgtatctatccactccatacttctttgtttttcttaatcataaaaaagtcatattcagaaacatgggtattgttaataattttttcaagtcctctgataggagtagattttaatttttttccgtttttataagagtaagaattaatcacatatttcccacccttgcttatttctaacaagaaaattttagattcgtcaaaataagtgaattttgcttggttttcaaattttgtcgacctatttaacggaatttttttcccggcttcatacttttcaaatcgaaagtataaagtattgaattagctgccaaatgatataaagtgtcatttttcacaaaaaagttattagtggaaagaggaattgccagttgagaaatttcatcagggatattataactgcctaaaggatatgcccctttaaactttttatgctctaaatcaatttctgctactttgaattgtactttgtttgatttatccgtttggttatatagtataaaaaaggctgagctttttttaactattatttgtgaataaacactccaattttcttcatttaatataggaattgttgttcctttccctactgtaactttatctttatctattttaataccctgaaaagtcggtgttttgattgaagaatcttcatttatcacgtaaatatattcaccgtcattaccagtacttgtatagaaacccggaataatcttttcatgaaatccactgccgttaccccatctaattaaactattataatggttttcaccgactccttgattattcaaaaaataaaagatattttcttttattaaatggcctgatgattgcccataacttgtatgtacttgatgctgcatcgggaattttttaaagttatcacctatcatataaacttcttttttgtcctgtctaactatgtttttttcatcttgtgcaatggttccaacctcaatagcatctccttttacagctgttgctgctcctttttcatcaatgtatacagtacaactcccatctttaggataatctattgtagctgaataatatatagctgcaattttatcattcaagaaatacttttccttttctttttcagtttgtttaacgtcagaaactgaattagtatatttaaaagttccaatacatataaatatacctattaatactatgaccgcaattataataagccacttaatcttgttcaaatataatctctctccttaaaataatatgactccctaaataaacttagggagtgaaaataattcatctaaatgttttaatagtttttgtataattggaatctctgatgtctcttggatagacgcccatgcctttatctttatccatatctataccagcctttagcttaaaagctgaccataatagttttgaacagtttttatcaccataatgactcgattttctatttgttgcaaaattatatgaataaccatccttcccaaccctgctataaccccaatttactgaattattttttttagaactagaaactttcacattttgaattacagcgtttttttcgaccttacgtttcgatgaagctattgcacgaacaccttttttagggaccgattcgacaatttgatttcccttatagtacataccgacatgtccatgcggaagcccaaaagtagatgcaggtgtatagtaaacattacctttagagcttgatcctataattttcggcccgctattcttgcccattgtgctcattctattacttttatcttcttctttatctagcttttcttgcttctttaattcagttttaatttcctctaagatctcattagatgttttattatcttgtttaactagatcattaacggattcaattaatttttttttcgacagattcggattcattttcaatatgtagtttactgtttctgaattatacgagtccacagccttaacacaaaatactaagggagtaacgatgcataatattgcaaaaaatttctgcattttcatacttattacctccaaccatttgtttattctcctatattttaatttattatacaattattgtaatcacaacttacgtactgtattttctctatggttaattatttgttttgtcgctaaaactttgacttgaagtacaggaaaacggatgaagttacggagaagaaagaagttgcccaacatatcttttacattcattgtttaatatggaagacagttattgataaggcggagaaatcatgagaaaaaaagaatactgtccttggttgcctgtcgttaggctttctcattcatcgtcacgtctgtatcgaacccatgttttttgcccgatcaaaaaaccttgcgggaacgttaccgcaaggtttttattaatcattactcttttccggcagcggcttccgcctgtccgccttttaattgatcgttgattgctttggcgtctttcaaatactcagtcttgaatccgctcttcagggcccacgcatagaaggcaagggcaacgattgcgatcagccccatatcccagccgtacggaatgatgttcagaccgccgaatttttcacttccgagccatgaaatgaccatcatgctgagcagatagacaaccatccagacgccgcctttaaagtttctgcggaatcctttccacttcgctttcgcttggtagtagaaataaatcggaaggccgatcaaaatgataaacagcacctgccctgttaacggccagcgcgcccaatacagcacgagagacgcgaacacgaagccgagcggtgcaaccacgctgaggcctttcagacggagaggccggtacaaatccgccgccgtccgccgcagcgtcatcaccgtcacgggacccgtgatataagaaatcagcgtcgcaacggaaatgatttcagcaagcacgccccatcctctgaataaaaacagaaagataaacgatacgaccaggttgaaaatcatcgcttggcgcggcacgccgtacagcggatgaagctttccgaaaatgctcggcatatatttatttttttccatgccgtaaatcatgcgtgacgtcgtagcggtataagtgatacccgttcctgacggagatacgaacgcatccgcataaagaataatgacaagccagttgatattcaatgcgatcgccaaatcggcaaatggagagttgaagttcaggtgactccagccgtgaacgatcatggaaggttcaaccgcaccgataaatgcgatttgcaataggacgtaaatgacggttgcgaccagcagcgaaccgacaaccgcaatcggaatcgatttgccgggattttttgcttctccggccatattaatcgggctttgaaacccgttaaacgcaaatacgatacctgatgtggccaccgccgtcagcacgctcgcccagccgttcggcgcaatgcttgaaccggatgtgaagtttccgccgtgaaaaccggtaaacagcagcgctccgattgtcagccccggaataatgattttaaagatggtaatcaatgaattcgcttttgaaaataagttaactgtccaataattcagtaaaaagtaaataatcagtaatacggatgcgaagccgagcccctctcccgtaagagtgccgttgtgaacgagattgcttgtccattttgcccattcccacggccatgagctcatgtattgaacagacgcaaccgcttccaccggaataacggaaacaatcgcaatccagtttgcccatcctgcgataaatccaataaatgatccatgagaatattgagtatattttaccattcccccggcttccgggaacattgaacccaattcactgtaagaaagtgcgataaacaaaataacgatcataccgataatccaggaaataattgcggcaggtcccgcaatctgagccgcccgccacgccccgaataaccagccggagccaatcatcgacccaagtccgaccatcatgagtgcaaacgttcccattctgcgatgtaattgattcataaagttaacacctttcaattaaaatatgactccagcgctatcatatatttataatattattctgaaaatagttttgtcaatctttatcgcattaaagcagaaagccaaaattacccttccgatgtttaaacagccgttaagcgggaataactactgcaagccagaaatagaaaggagtttttatcgtgaaacaaaaactgctcatttcaggacttgccgtgtcgactgtcggagtgacttcctacctgctcaaagataaatccaaccgccaaaaggtgatgaactttatccgcaatatgaaaacatcgctctccgggaagcaggatattgaatcattccccgtcaacaaagcaggcaacccgcatcccgaagatattgaagataacaaaatggtatccgaaggctccatgtacccggttcaatattatgatgacaagaagaaatagtctgttcccgggctgcccggccgtatcaaacggcggcagctttttttatgcagacggcgtttgatagatccgccaatattggcgcgatcctttctcccgcacggtaatgcccagtttggatatttccgctttcagctctttcgcatcagccttttcctcctctttcagcgccttttctctcgctttaaaaagagcatttgcccctggctccaaatccggcgtgtccggcacccaccgtttgtattcttctttaaaaggatcttccgtccccagccagacatacccatgcgcgcgaaacgcatcagccgctttttcaaccgcgggctcaagcttctcccgaaaaagctcctgcccttcagtccccaataagacaagatgcttttcatccgtaaacacaccggaaatgctgtctttcgaaaacacgctttcttcattatatatggttaaggacacctcgctgtccgtcacgaccgccgtaagacattctttaaaaacagtccgcgtcagccacattcccccgattaagccgataacggcggttgcagccgcagccttccatccgtgaaaagaagcgatcatttccagcggcccgataacaggcagccaatccaatgttacggcccacttcgcaatgaccggcagaaaccatccgatgaccagccccaataatggcggcatcagaaaaaccaaagctttttcaaccgatgacaactcaagaaccgtctgtttttttatttcgttcatgtttctcctccgtctgtgtttttcacaactatccattatacaaagggttggatgattctgtaaactgtttccgaaacaataaaaagcctcccggccgccgggaggctttttaaaacaggagctcatatacttcattcaattccatcgtgcgcttctcatcctgctcgttctcagcatatttgatttccttttcaagcacctgattcagcgcatccatttccagatcatttagatctttcacaaactcgccctcatttgcataatgcttcacctgaagctttttataaatcccccggcacacatcatgctccaagtggttcgaaagcgactcgcgcaaatatccgagtgtcctgtccatcatgtaagccctcccttttctttaagaatagcttcccggaaagagagaaaaactatacatgaaagcaccgggcggctgttttaactctgtacctgaatggagaaaaacccgctgcttaacggagtgtacggcccgttcagccccgttgcggagaaagagaatgttcctgaactgacataagaaagaggaacactgtaatatttaatatagcctgtaacgatattgccgtttttcgtatattcatcttccagcgcttttgacgtaagatttgtaatattcgttccgttgttaaacgcctggatcgtgttattgttcggatacccttggaaatatacggctaaataacccgttgtacccttcatcggttttgatgcgctgatttggttcggcccgatattttcccattggtaactctgaccgtcagacgtcacaccgataatacggatttgtgttaaagcaggagccggcgccgcagacgctgatggagcccacaacccgctcacaagcaacaaaacagcggcggccgccgcgaatagcataacgagtctctttttcatgtttcttccccctcttattcttttcgtagaatcctatactattttacacgatttacaaggaaaaagattacattttataaaagagtccggaacactttgtgaactagatatgaaacgctcttgaaacgccgttgatcatgagaaagatgccgcagattcttaacacgactctcgaacttctgtcatctttaccgaaaaaggtttttccgagccgcccgatccatacgttcattgcaactcccgcgagcaattctatgattccgatcatttctgccatatacaaagcagccacccttctaaccgttttttttcatatgacggcttatcatataaagtgataagaccaatgacgctgcaccgacagcaagaaacaggctcagcggcacgatctgcatgctgcctccgccattgttttgaaatgcgccgatcgcccatttttcaggagtaaacaacgacagcatgcgcatgtactccggagccgcgtctaatgtgaagaaagcccctcccaataaacccgtgacagctataaaaacggaagcaagcgacgtgaattgcttttggctcttcatgaacggtatcacggccatcgttacagcagtcagcgcaaacgagcaggccgcaagcaccgctcccgcagcaaaaacatgatcagcaaaacggatatgcagcatgaatgttccggcagcgaggatcacgataatatggagaagtccgaaaagatacgccgccgcaaacttagagattgcatatgccgtataggaaacgggcgtgctcagcaatctgtcatatgtatgattttcttgttcatctataaatgatcgcaggctttggactgcaacgaaccagataaacatcactaaaaatccgataagtctgtcggctgcctgtccgccttcataaacgtgatggcggtcaacattgacggcggaatgaccctgaatatccttcaagagatcagctgccgcctgcttcccgtcggtgtgcagcgtgcgggatatcacttttgcatcgcggactatttttttcagctcgcccgcctgctgcgcaatcagctgctctgtcaaaacagcatcacccttttcttcattctgaataaatgaaacgttcaattcatctccggaaaataatgtctcttcaaaatgagagccgatcagcaatccaaaggatatatcctgatgatgaacctttgtttttaatacatcctccgtgaccttcgtgacttttatatggccggctttctgaatcattttcataaattgcgctgaataggcgctctgatcctcatcagctacatatacttccttctgctgactgccatccgcagaaaaggaaaagaaatatgtgagaaggagcggggcggaaatcgtcgcaaagatggcagcccgattttgcagcatcagtttcagctgatgtctgatcatgaataacagctgcgtcatgaaacagcctccttccgtttaaacacccagatggtcaaacataaaaacacggcgccgatggcggcaagctctgccaaatccgtcgaaataccgctcagaccggcatgctgcgtgacactgacatagctgttgatcgctttgccgttcggtatcagctcctgcacgattttcaaactgtcaggcaagccgtcttttgcgataaagcttccgcctaaaaaactgaatccgtataaaatgggagccgccatgcttgagacggtctcgtggttttttgcagtaaacccccaaagaagcacgatactgccgatcgcaaatgaataaacgatcgtaaccagcaatatttcaaacaaattgccccattttacctgatacaagatgctgcttgcgatgatgacggcagccatttgcataaggatggcaagcatgattcccaaaagcttacccgccacatactggatacgtaaaacaggcattgatttgattctgaataacgtgtgctgctgtctctcttccactatcccgtgaatgagcgcaaacgcggtcataatggagaacatgacgaccattgcgattgaataatactgcatcgcatcaatcggagccgcatgattgccggccgactgtttcggaatggtgacagcctgttcacgttcacccgaaaggccgctgatgattttgctggcatctccctttgacagatgtcccgacttcttcagcaccgctttttcttcaccgatctccgcttttactctggtgacaaacgaatcagccatcatttccacaatgtctccgtttacagagccttgttggtccgagatgactttgatacttgttttttcattgtgttctgccgcttttgcaaagcctttcggcacgtatacaaaaacggagactttgccgctttcgacaagctgtttcccttcttggaaactgcctatgtcttttacacggatgagatcagtttgtttcagcacgtcattctttaatacgtcgcccaaagaactctccgcgtgatccgcattataaaacgcggtctgaaacggcttcactttcgaatcgccgtgaaaaaccgttcctaaaataaaaatcatcagtgccggaaacagaatcagttttatatagaaagactttgctccggccaataaccgaaaatctaataagatcagcctgaataatattttcatgacgccccctatgaatcccgcagcgttttgccggtgagccggaggaaaatgctttccagattggcttcctcgaaatgaatgcctttaatggtgataccagttttcctgatatcatccgcaatatcaaggatattgcgatctgccgcagagacgagcatcgtaatggtctgctggctgacagcagcctcggcaacaccgggaatgcggcggatttttttaacggcgtcatcattcagcccctctgcattcacgatcagggtatcagaggctttggctgactgcttcaattcatctttcgtcccgcaggcaatgattgagccgtgatccatgatcgccgctttttcacagaggtattcgacctcttccatgtaatgactcgtgtagatgacggtcatccctttttcttgatttaacgtcttcacggtttcaagaatgtggtgtctggattgcggatcaattccgacggtcggttcatctaaaatgaatagtttcggttcattcattagcgcggccccgatattcacccgtcttttcatgccgcctgaaaactcagatatcctttgatttcgctgttcctgtaattcgatgatgtccagcacttcatcaacccgtttacaaagttccttaccggaaagtccgtacagactcccgaaaaaagccaaattatcctttgcgcttaacgcttgatataaagcgatttcctgcgggacgactcccatcactttttttatggccgcaggctgctcctgtaatgaggttccgtcaatgcagattgttccgcccgtcggcgggagcacggtgctgatcatcgacaccgttgttgatttaccggcgccgtttggtcccaggagaccgaatatctctcctttttcgacgcgcagtgatatatgattgacagcggtaaaatcgccgtacttctttgtcaaatccgttaattcgagcattcgtgcagcactccttgtgtcatgtctgcacttattctactcttggcgatccttgttttctattcactttcgtactcgatatgggtattactttcgtcatatgtttagtgataaaaagggagagaggagggtgaagcggggttatagcaatttttgcaaatataaggtaagctcggttctgtttgacacttcaagtttatcgaggattctggatacatagtttttcacagtgccttcagtcagaaataagtctgcggcaatgcgtttattgcttttgccttccataatgtgtttcgccacatcaagctctctcggcgtgagaatctccttcagctttgaccgcggctctttctgcaccgcagggatctccatattgttcagcgcttttacgacggaaaccgtgattttgggattcagcatcatcttgccttcataaacggcttgaagggaggcggtaatttcatctgaatcagcatccttcaagagatagccgtcggctccgcttttcagcccggcaaaaatatagtgatcatcttcaaacgttgtcagaatgatgacttttacggacggatatcgcgcttttaccgcttttgtcgtttcgattccgtccataccgggcattctgatatccatcaaaatcacatcggtttcggtttgagaaagcagccggagaacctcttcgccgcaagaagcctctcccgatatttgaattccttcatgaagactcagaatcattttcagcccctctctcacaatggactggtcgtctgcaatcatgacattcacttgattattcctccttgcatggaatccttattttcacgtcaaaacccattttcttcccagacgagaaaacagcctctccgccaagtgcggctgctcttttctcaattcctttcagaccatttgattttatgatcgttccgcaggctgagccgttattatgaatatgcgccaatatcatgtttcggtttttttgaatccggacagaaacatatgaagcatgcccatgttttatcgcattcgtaatcgtttcctgaacggattgataaagacattgcttcacatccggctgttccgcttctatggccgcgtccgtctccagctcgaagcgtatgcctcccgcctcttgaaaatggctgaaaatgtcacggagctcttgctcaaatccccgccccggcaaagagccctgcagcagcataacggcctggcgaagctttaaaatggattctttcgtaagatcatgcgccttatgaatgatctgcttcactttgtccggctgatgcccggctgtcttcccggcaaattccaaattcattttcagagcagccagataatgaccgagagaatcatgcagctcctgcgcaattctagttctttctttcgtaacggccagttcctcaatccggtctgaatattccttcagtgtgtcattagcgatcttcagctctcggttcagcaattcaaccttcgacttctcctgcaggtttttccgatataaataaatcaccgcaaacatgatgaagtatggcggcacgatatcactgacacccgctccgccggcgtataaagctgcggcaaatgcggcggcattcatcgttaacaaaacagccgaaatctgcttatcagtaataagcacctccgccaataaaagcaccattacggcctgtgcccccacactatagacattgtacaaaagaactcccgcgataacgctgctcaggagaaaagagacttgatatacagccggccttctcttcatatatagcggccgcaggcagtcattagccgtcagcataatcacgagcacagacaaaaaaaccttcagctccccccggccgggaggaagctgaagaatcgcatgaaagattgatagtaatgcaaaacccctgatcagtaacttcgtatgtgcaatcttcatcgaattctccttacaaatgagcggcggctttccgctccacgttcagcacatcatacagctcatcaagcgaatgaatttcatgcgtcgggatgatctcggactcatttgctttctttccgggattaaaccagcacgtatcaattcccgccatctgaccgccttttatgtccgcgctcagtgaatcgccgataataagtccgccctcggcagaaaaaccgggaattctcgcaaacacgtaatcaaagtattccttcatcggcttttgaaaacccgtgtcctcagatacaaacacatctttaaagaacggatacagaccggagtcgcccagccgcttatattgtgatcttgagacgccgttcgtcacgatgtataaatcaaataaaggactcagccgttcaatcagctcataagctccgtctatcatctggtgcccttcttctaagtattggcggtacgcctgattcatcagcacgccgtcggcttcgaggccgtattctttaaacaaaagggcaaaccgtgtattgaccacttcatcgcgggtcatttccccctcttcaaacgccttccacagcccttgatttaacgctttataacgggcttccacctctgccgtcagctccagctttgaaccttgaaacaatttttgaagagcatcggtttctgaagcggtaaaatccagcagcgtattgtctatatcaaataataacgtacggtaatgactcatcgatgtttcccccggttctgctttttttaaccagtataccactcgcggacaagccgaaaaagacacccctgtaagagagtgtctttttgaattatacagcgtcttctattttcgatttttcaccaggcatgcgcttgccgataccgaacgcataatagctgaccgtcacaatcgccaggaaaatcaccccgacaaccaacgaaatccgcgtatctttgttaaaccacatgccgatcaataccatgagtaagaaagcgatcgtcaaatagtttgtaaacggcgcaaaaggcattttaaacggatgcttatcaagctcagcgcccttcgctcttctgaaaccgagatggctgattaaaatgacgaaccacggaatcattcccggcagcacactcgcgctgtacacatagacaaaaattttcggaggcgcgatgtagttcagcacgacaccgatcacaagtccgattaatacggcaaacgtaccgaatatcggcacaccgctcgaagaaactttcttaaagaatttcggggcctgtccgttcacgcccaatgtataaagcatgcgtcccgcactgaatatcccgctgttgcatccggacatcgcagcggtaatcacaacaaagttaatcaaaccggccgccgccgtaatcccgactttcgcaaatgtcgaaacaaacggactgccgagtgagtgaagctcattccacggatatacggtaacgattacgaaaatcgcaccgatgtagaaaattaaaatccgccaaataatactctgaatcgcgcttcgcagcgttttttgcgggtccttcgcttcccctgccgtaatcccgatcagttcgaccccttgataggccgcaacgaccaaagacaaggcaaagaaaaatcctgaaaaaccattcgtaaagaaaccgccgtgcgaccataaattagataatccgatcgcatgccctccgttaccgaaaccgaagaaaataattccgattccggccacaatcatcagaataatggtgacgattttgatcatggcaaaccaaaattcaaactcaccgaaagattttaccgaaattaaattcgccgcaccgagaatggccatggcgataatgccgggaatccatgccggcagatcaggaaaccaatatttcatatacgaaccgacggcgataatttcagacatcccgacgatcacccattgaaaccagttgctccacgccgtcatatagccggctaacggatgtatatacttatggccgaacgtcgcaaacgaccctgtactcggctctacatagagcatttcgcccatcgcacgcatgataaaaaagataaagatacccgagatcgcataagccagcaggacagacggcccggtccatccgatcgtgctggatgaccccatgaataaaccgacaccgatcgtgccgcccagcgcaatcatctgtatatgacgcgcgcctaagcctctctttaattctttgtttgccacttcgcttcctcctcttaacagctctgatatatgtgaaataatgaagcagaaggtgcacctgttgaacctaactcactcttcatttcccgcaatattagaaatattctatctttctattgttatataatctccaatttccttatttcatcataataaatttccgtggaaaatacaattgtttttttcaggtaaacaccttgcaccctaaatcaacaaactaaaaataaagcgctttcatttttgttgaattatgaatattgagataataaatgctgcagcctccgagaaacaggatgtccctggagaaacatgttccgccccctattcaatattatttttgctaagcagaatggcgtaaagccttcccctcttccattctcccttgtatacgccataatcctgcttaactcggcaaaaatcatgcattaatcgataaatgcctcattcagccgcagcaaaagccggccgaacatttctttttcatcgccggaccaatcgtcaagcatacgatgataccgctcaagacgcatctttttatcagcttttaacctctgtttgccaagcttcgtaatcgcaaacagactgacccgcccgtcagaaggatcggaaaaacgctggatcagctctttcgactccaaggccgcggcctggcgtgacaatgtggaaatatccagcttaaatgattcggccaattccttcacacgcgccggcccgaattcatccagctgccgtaataacaaatacgcagccctttccagatgtccgattttacggtcggagttatcaagataaacagctctcctgataaaagtggtgagctcatattcaattaattcaatcggatcttgttttgacaacagcctcactccttacattgacaacagcaatattagttgtataatacaaacatatgcacatttactcagaaaacatatagaaagattttgcatacatatatttgtatagtacaaatatatgcgcaaaaagtaaagaaacatatcgaagcatcaagaaagggggaagctgctcttctccaaagaacagcattgtcgtgaaagtcatacgcatcatcttgcaaatcattattttattcgcattttcctttatcgggggagccgttcagcagttctttcacctgcccattcccggaagtatcatcggtttgatcctgctgatcatatgtttatcggttaagatcattcccgccaaaatgattgaagacggagccggatttttgctgtcttttcttccgctgttattcattccggccatgacgggcgtcatcaattacccgtcactgttttccgccagcggggctgctctgtttctggtcatcgtgctgagcaccatcgtcacaatgatcgccgcagggtacgccagccagctgttagagcacaaagccaatcagagaaaggagaaaaagaagtgcagcaagcatgtatcgcaatccttataattttgttcacggctgccgcctatctggctatggtgaaattatatgtgcgctttccatatccctttctcataccggttttgacgactacgattttcattattgccgtgctgcttgtttttcatatttcgtataaagactatatgatcggcggacaatggatcaattcactgctcggacccgccgtggtggctttggcatacccgctttataagcagcgccgggtgttaatcaagtatatgtttccgatcatcggcggcgtgttggccggtttattctccggaatggtcagcggcctgctatttgcagagctgttcggcatcagccggagtttgattttgtcaattatcccaaaatcaattacgacgcctgtcgccatacagattgcgtccggtatcggcggtgtcccttccatgacagtcgtgttcgtcatgatcgcagggttttccggcgttatcttaggaccgctgcttctcaagtggatccgcatccgcagctcactcgggaaaggaattgcattcgggagcgcttcccatgcgctcggcacctcaaaagcaatggagtacggagaattaacggtctccatgagttctgtttccatgacgctctgcgccgtgttagggtcggtcttcggccccgtcgtagcatggatgtttcaaatttaaagctggcggttctccgtcagcttttttcatgtgcggatcatctcattcccttccattattatgtttcatttgtaagaataatggtaaagtagaaaacaaggagggatttaatgatgactggagcaattccgcaaaagaaactgctggatgggacaagcattcccgcgttcggcttcggtacatacgctcttaacggaaacaacggcgttcatgccattaccagcgccattgatatcggctaccgtctgattgacaccgcttataactatgaaaatgaagggacggtcggagaagccatccgcagaagctctgttccgagagaacagctatacgtgacgtccaagctgcccggacgctaccatgactatgacaaagctgtacaaaccatacaagaatctttataccgcgccggtctggactactatgacctgtatctcgtccattggccgaacccgaaacaagaccgctacacggaagcatggcaggcactgattgatgcgaaaaaatggggtctgatccgatccatcggcgtctgcaatttcctgcctgagcatatcgaacggctcgaacgtgaaaccggcgtaaagccaggcatcaaccaaatagaactgcatcccgcttttaatcagcagcagcagcgccaatggcacgaagaacagggcatcgtgacagaatcatggagtccgttatcccgcgccggcgaagtattgaacgatcaaaaactcggacggattgcggacaaatacggcaaaaccatttctcaagtcattttacgctggcatatccagctgggcgccatcccgattccaaaatcagcatcgcccgagcgccagcttgaaaacatctccgtttttgatttctcccttgatgaaaacgacatgagcattatcgactcgcttacccgccccgacggacgcataaacggccaagacccggcggagtatgaggagttttaagaaaacacataaagaaaagctgacggcatcatttgtcagcttttttctcattttatatacgcacacccagctcccgtttccattcagaaagccaatctgtatccccagatccgtattgcctgctttggccgacatcacgcagagatccgtttttatactcaatggacagcaccaaatcaggaatggcatcataccccattctcgccagcttcgtgagcgcctgtccgtaatgggcagccgcttctgccgccgtatgtttcaacaaaggatcgagctgcagcgcttccttatagacgtctaaaaggtcgcgtccgtcttctgtgacgtactttccgtccacgatctgcaagtctttcagatgatagccggtcacctcatacatttcccgaacgacttgatatttctcatatgtttccggcgtaaactgcgaggagtcatcactccggctgcgaatgatgtgcgcaaacagctctttgctgttttccccggagtttaagacagcttcaatctgctgagtgagctctttatcgtcagtcccgctcacttttaacagataatcaatcggtgatatcgtaaatgtaagattcgcaccctccggaatctgaatatgattccgatggaaaagcatctcaatctgctgattcacctgcccgcgctgaaacaccttttcattttcgacttgaatctctccgttgagcgtttcaccccgaaacgccgcatcacggaaatcatagctctgggccttccccttaaacagccattccgtttcattatgataagcggcctgacgctccgattctgataaatcacttctgaaataaggtgaatcggcaagctggtatttatccttaatataatgcaaaggatctggttttcgtttattgatttcattgatacggctgtatttctcatcaagaatcttgctcgcaatatcactctcagactcatacggattattagcgtctattaccgtctcattcccattatccgtaatcgttttctgatttgcagattgatataaacgggacaggctgctccctttctcagtgacaccgctccttgaataattcacctggctcagatcgcggctcccgcctgtctgaatcaataagctgtccgatccttttgccgcatctttcacatttgttttggaagaataccgctgaagcacttgctgagccattacttgattttttatatatcgagcgtttaggcgcatgtttttaacctccgcttgagatgatgttctagtgtttttatcggctgtcttcaagtagattttaaccttaaataacaaatgtttacatagctaatttttctatgtatgatgtagtcaaaaagggggaattttccatgaagaagtatatatctatactatttgtcagtgcattcgtattatcaggcgcattgtttgcatcttcaccttcagcctctgcgtctcaaaagaactcgttacaaataagcgccattacaggaaatcattcatttgaaactgccaatccggtaggctactggaaatataaaaatattgatactgccatattgccaaaaggggaaaaagattcgtatttcactttcacggcaaataagggagaaagactttatgtcaggagttcaacaagaagtgaatacaagggaatggacattgaaatttataataaaaataaagtactgatcagtaaaagcacagaagtgataaatcctgatacggcgctaccttttatctatgcgaatacagatgcgaaagaaaataacgagacgttctacgtgaaagtgtcccgcggctcctacactgacgatatgtactttacactctctatttacgaccgaatcaaatccggcagtgagaccttctcattcagcggtacagctgaaaataaagggaacacaagcctcagtccgaatggatcagattcaactgttcttagactcgacttaaccaaacagacaagcattccaagagacgccacagtgaaaagaatcaacaccaccgcaacccaaacaccaagccaaggaaatacaagccactacataatgtcggaagaaaataaagtgtggcaccgtgcacttgcaaacagctccactcaaggaaattacggtatcacactggatgataacctctcagtctcaagcatctggaattttaaatacaacacactcgcaacagcaaaatcgactatgaaaaatgtgaaattgaagattgattatgagtacgatgtgacaacgcagttttaattagaagaacagccgcccattgtgcgggcggctgtctgcttggagttaaagtaaatttatgaacccgtgccatgccgtatcctgttataacttgatcagttgctaaaattcttttttatgatatatagctgcggcaatgaaaaatgaaatgatatataagataacgccgatcatgagatatataatcgggacatataaagaaggatttatgtgcaaaaatgacagcggtacttgttctgctgcatacccaacgacactttgcaatccaaacgtagcaaaaagtccccccattgctcctccaatcacgatagcatcggatttttccgggcctatcatgtagagaagaggataaacgattgcaccggcaaagagaacgatgaacgttccaaaagagacaatattaaatatgccgtcaatcggttcatcagaacccaggctgtatacaaggaaaataccataagatattacagctccgatcacaacaatcaaaagatagaagacatagtggctttgaacaatatttgttctgctgaccggtaaagtcaggacatacctgtcatagccagacttgctctcatactttataacctcaagtgcgggcatgacgacaaacaaaataatcagcatagcaacaaaacgatgcattgaagcatccccaaaataaaaaatgactgctgataccaatatggccaaccccgtgtatgcaaagaaactccgataaaccaagtaatagttagtcagtaacagacctctcaatgttttcactcctcgttaaaaagacgctgatttcttctatggaaatggtgttggccgttacgccattcggcaatttctgttgatccgatacaagcacactccaataagatccacgatccctttttgctagaacgatatcttcgtcaagctcagccaatcggccttcatcaacgtctataacggtatagctttcaagaaccttatctttctcttcatttaataaaatttcgccatctttcataataacgatatggctggctatcttctcgacatcagtcataatgtgcgatgaaagtaaaataccgccgttgcttttgctcacaaagctttttaattcatttaacagatcatctcttgaagagggatcaagccctcccgttgcttcatccaggagtaataattttgcattatgcgacaaagcaacagctacggataacttcattgacatgccgcgcgagaatgtattcacttttttgtccataggtaaagagaaagaatgaaccaaccggtaaaaatgatcttggtcccaagcaccgaatagtttcttaaatacatgattcagctgctttatcgtaaggtgcgcaggaagattcatcgcatcaaatacgaccccaatatcttctttgaactttatatgtttatccagattctctttaccaaagattttcactttacctctatcctgagaaattaatcctaatatcgttttaaatgttgttgacttgcctgcgccgttatcaccgataaaaccgacaattgatccggcaggcacattgaatgtaacatcctttaaaacagctttatgaccaaaagatttgctgatgtttctgatttctaaaaggtttgacatcattccactcctatcattgtcgtcaggacttttttaagaattgaaccggattattgcaaaaatgttgtgattttcatatctggtctaggtattcataatggatcaggagtcgggaaatacaaaagggattttaaagtcttaagcataatatggaagtgtaatcgattgattacgtttatataatgggatattcatgatgaaaactgctgaggtgtttactttccgatgaggtatacacaaaatgatttactaatgattacatttatggattttaaccggaatgcatctcgtattataaagcaggtgttactccttttcaatatataaaaggggatttctttacaatcgcaaagagtatgcatttctcatttccgcattaaaaaacccctctggctaataatgtagctttcgaataaagttcaattaaaagcattttgcaaacgttgattttataatagaagaaacccacacattttgaacaaagtttgatcaaaatgcgtgggtttgatttttgtgtggagtttggttttataaaaaagattgatataaaatatcaatttcccactatgtatatggcattaactaaattcaaagcaatcatttagttaacactttggttaatttcttttataaaagctgtatagtcagatgcttttaggtcacttaaattagtattgttccaatcacttatatcagataaaaattcactgacgttatttgtgatactctttattctttttaactcctgtaaaggttcaatcttatttgtatcttgagttattttctgaatcatttccgagtatgccttctctttctcttcccaatatgatatatatcctatcctttgctcaaaagaatatatattagctgcaattgtagtcggtatctctgaaagtgaaggtacaaattctttatcagaatcttttagtataactaataacattttctctttatattcacgcgaacgcataacttcagatatctcatacatacaatttactgattttaaatattggtcactaataatactaataacaaaatcgtgtttcccaatagttttcatgaaatctttaatactatctttaaactcaatgtttcgaacatctctagtcaaagtataccccatatttttgaaatcattatcaattaaatcagcaaacgctacatcattccaacaatatgaaataaatatcttctggttcttcatctgttcagccactccactatcaccaattttataaatcgttttatttactgttactaattcctctgctttattaatagagatataatatagcctaatgtcttttaaagtaaagtactcacttttaatatttataataccctctatcaaattttgaactctctccaaaccaaatctaaagggaaaattctttatttctaatctttttccatcatctcgtattccaaagactatatctccaccgttactgttcgagtatgcaacaattaattttgctatttcttcatgactcgcaattgggtgtatatatgttgtattctgtctattatttgtacttattttgttttcaatatctttaattgttctaaacactaaaaagtacctctcttataacttagtcaatggaattttagatatacctgttgttttaagcaaatcacctaaagtaaccattcgttgtacttctccatcatccgtccataattgatagttgacatcatctaaagcctctaattcttcatcataataaaatattattttttgataatcacttggacgaataatgattctaaaatcatttccgttatacttagccggaaataccgtatcagaatacttttcattcatccattcttctaaagttgccggaagtgtataatctttaagtctgcttaaatacttaaaaatattttctgtacttctatgtagtaatttctcaacatagcgtttcatttcttcggatgaggtaataacatgttttaattgattgataatatcttctttactcagttcagagttagttacaatctccattattttatctcgattattaataatttcatctaattcttcaaacttaatgttattttcctctattttttccgctattctatatcttctcagattttcttctggagaagataacatcattctctttgaatataaattcccaaaccatttttttgatttttcaggatttgataggaaccaattagttaatctattaaatattttttgggtagattcatttctttctatcctgtcaatagtttcctcactgagaagttttgatactttgagctcaatttgatcagagcatatttcattagtcttaatttttttggggtgttcttcgaaatagtgttcaaatgaaataatatctactttcaataactgtccttcaattttctcacccaataatgttaagatctgttttaattcttgatctatatttttatcaagataaatacaggcgaactgtacaaattcattaatttgattcggtacaaatgccgattttacaacttcatcaatacctgcatccttaatccaaagagaaaaaaatgcatttaaccactctgcatatagagtcttatcattcaaacaagcaactaatttatcaatatttgaatcttcaaaaatatcgtttatccaagagaatccagcattctctccaaaaacctccgcccagcctaagtaagtatctttagttggtatcgatactccgttataattagataaaacatcccaaagtaagtccttatgtgtgcttttttttgtttttggtatgcctattgctacgttaccattattatctttaaatgctaatcgtttcaaatcttccaaatgattatgaataggaacaattggactcttctcaatatgctctttaatttctttatagctataagcctgaatatttgatgaagtagagggttttaaaatgcaaatattaaattcatttcttgtccttttactttctgaacaataatctattaattccttgtataaagagacagctacctttattaattcattatttactggattgctatctctaatagcatttctgtccctttctacttcaaataatcctgaattaactactataggaaaactaaatttttcagttcctaatagaggaaattcacaaaagacccttggcatggcatcaggaattggtaagaaatataatttcttgtctttacgttcgatagcacaaccaatagttacattattttcatttaatattagcaactctttaatactatcagaaacgttaatttgaacagcttttagcttgttatttgaacgtgaagtttctactttctcctttttgtaacaatcaccattgtatgtaatagagttgatattcttattaaaagttaatacataaggaatagtctcttttaaatcttctatcccttcctctactgcttcttttatgtcatcatcctgtattaaataaacgaattttgtatcctcatactcttcttgtaattcctcttgatttctgcttacaagatctaattgttctagcataatttttgttttattcttaatatcgctataatcatctcctgacctatcaacaatgaactcaaattttgtatacctactatcttcttggctaaacgacccttcaattcgtacaacctctgataataaatgagtcgacataaaacctgttccaaattttcctgttttcttttcttctgaactttgcttagatgagatttgtgtgattaaatctaataaattttcatacgaaaatggcagtccattatgactaaatatgatttgattattagagtaatcaatttttatatctattttcttacctttaggtgtacagtctgatgcattttgaattagttcccatatccatctacgcctaatagtctttttttctatttctgaagactctcttatctttttcaattcatcccaaattgtattagaactcgcatctaaaactttatttaataaaacctcttcattagacatagtaataatcaaacctctttttccctgtatttttctgaattcccgggtattaatttctttttattttcggcattataagatttgaggagccttctatattattcatttaaatatcctttacgaattctccaactctcttgatttaagtaaagatgataatattacctagatctcgaatgggtttaaaactacttcaaaaacattaactgatatttctcagtatattgattttgtacaaccttctaaccaatatttattcgtctccctaagcctttatcataacaatgtgttcttttgttttaagaactgtatgatggtttatttctaactcatctgcaacctttcattgataatataatctaatgattatcttgtatgctaattttattttctaaatattcagttaaatgttataattattgttttatatcagatagaaggctcctactatcttccttattcaatttattataaacgatgagcatcctttttgaagttaatacttgaatgtttagctccagtttatgtattttttagctcctatacctttttcaatcaatttttctacttagttttctgtttagacatgaaaatacccctttagatgagtatatctaaaggggtagaacggtgcaactttttccaggaacaatacaaactttgaatttaaaacaacatactgttttctttccttgtcaaatccttattccacagtcacactcttcgcaaggttgcgcggtttatcaacgtcacagccgcggtgcagtgcagcgtagtaagcgatcagctgcaatggcacaacagataccagcggagcaagcgcagggttgacttccggcaggatgaatctgtcgtctgcgtcttctaagcctttcagcgagatgatgcaagtgttggcgccgcgggctgcgacttccttcacgtttccgcggatgctcaggttgacgtgttcttgtgtcgccagtgcaaagaccggtgttccttcttcaatcagagcgattgttccgtgcttcagctcgccgccggcgaagccttccgcctggatgtaagaaatctctttcagcttcagggcgccttcgacacatacgaagtagtcaaggccgcggccgatgaagaaagcatttcttgaaacagtcaggtactcacgcgcgatcatttccatttcgtccttctggtcgcagagggcttccatggcgtttgccgcaatacctaattctttgactaaatcaaaaccgatatcaacaccgttgcgttctgctgcaacggacgcaaggatcgcaagcacggcaatctgagccgtatacgcttttgttgatgcaaccgcgatctcagggcctgcgtgcagaagcaatgtgtaatccgcttcacgggaaagcgttgatcccggaacgtttgtgatcgtcagcgctttgtgacccagcgctttgacttgaacaagcacggcgcggctgtccgctgtttctccgctttgagaaaggaagataaagagcggcttcttagacagaagcggcatgttgtaggagaattcactcgctacatgcacttcaaccgggacgtttgcccacatttcaatatattgtttcccgacaagaccggcatggtagctcgttccgcaagccacgatataaatacggtccgcttccgccacggcgtcagcgacatcgccggccacggccagtctgccattttcgtcttgatacgtttggatgattttgcgcataacaagcggctgctcatccgtttcttttaacatgtagtgagggtatgtgcctttttcgatatcactggcgtcaagctcagcgatataagacgcacgtgtcatgacttcaccgtcaaggtttttaatcacggcttcgtcttttgtcacgatcaccatttctttgtccaaaagctcaacgtattcattcgttacttgaagcatagccatcgcgtcagatgccacgacgttaaacgtatctccaaggccgattaacagagggcttttgttttttgcaacgtaaatggtgtctgtgttttcaccgtcaaataatgcaattgcgtaagagccttttaacagagtcagtgttttgcggaacgcttcttctgtgctaagtcctcccgccacaaattgctcgatcatttgaacgactacttcagtgtccgtgtcgcttttcagttcaacgttttcaagatattcgcgcttcagctgaacatagttctcgatcacaccgttgtgaacaagtgtaaagcggccgagtgcgctttgatgcgggtgagcgttcaggaagcttggttcgccgtgagtcgcccagcgtgtatggccgattcccgcttgagattcaaccgtgtgatccaccacttcacgaaggtcggcgatgcggcctttttctttgtacacatgcacgccctgctcattcgccacagcgataccggcagagtcataaccgcggtactcaagcttctctaatccttttaacaaaatctctttcgcatcaagctgaccgatataacctacaattccacacattttttcttcctcctaaaggtgcaaaaggagacgaagaaagtcaaattacaaggggactttcaatcgtcccctcccacatgtttttttggaagatcatgtgatttctctttgttcggagagtcgcccctccggtttgaagaaatccttacggctgtgatctaaatgaatcagccgggaggcatccgccgaaaattcgataacctccatcctcgtcaactaagccgtttttcgggcgcttagttcgggcgctgtaattataaaagatgcaaacaatcccgcctttcctgcaagtgaaaaacaaaggctgaacaagcttgattttacagcatgtgccaaggacggtcaattattttttgccgccccggcatcatgtttactatcatattatgctgatcgcacttgtcttgttcgctctctgcttataaacttcgctactccgctcccatttctgtccgcacgacatccacgatttttgtgacatattcgtcacaaagctcttttgttctcgcttcggccatcacgcggacgagcggttcggtgcctgacgggcgcactaaaatccggccgtctccgttcatttctttttccacttcagaaataacggccttcaccttagcgttttcttctaccttatatttatccgtcactttcacgttcactaagagctgcgggaattttttcatttcatccgcaagttctgaaagggttttgccggacgccttcagcgtattcacaagcatgatcgcggacaaaagaccgtcgccggtagtgttgtaatcaaggaaaataaggtgccctgactgctcgccgccgacattatagccgtcttttttcatcgcttctacgacatagcggtcgccgactgccgtttgaacgcttttgatttcttctttttcaagcgctttgtagaaaccgaggttgctcatcacagtcgatacgacggtatcatccttcagacggccctctgatttcaaatacttcgcgcatatgtacataatctgatcaccgtcgacgatgtttcctttttcatcaacagcaatgaggcggtcgccgtctccgtcaaacgcaaggccgatatcggcgtttttttctttgacgaaagcactcagcgcttccgggtgtgtagaaccgacgccatcattaatgtttaatccgttcggagacgtccccattgtagatacgtcagcatcgagatcggcaaaaaggtgcgtcgcaatggatgatgtcgcaccatgggcgcagtcaagcgctacatgaatgcctgtgaaatcttcgtccgccgtctgctttaaaaattgcagatacttttgaacgccttcaaaataatcgtttacaagcccgaggtccgcgcctgtcggtctcggcagcttatcttccggttcatccatgagacgttcaatctcggcctcctgctcatcagaaagcttaaagccgtcccctccgaaaaatttaattccgttatcctgtacggggttgtgagaagcggagatcatgacgcccgcctcagcatccatggctttcgttaaataggatacccccggcgtagaaataacgccgaggcgcatcacttcagctccgatcgataaaagtccggcgacaagggctccctccagcatatgtccggagatacgtgtatcacggccgatcagcactttcgggcgctgcttatctttggtcaggacataaccgccaaaacgcccaactttaaaggccagctctggcgtaagctcgctgttggcaacacctcttacaccatctgttccaaaatacttgcccattttgtatcgctcctttttcattctgttgaagaagaatcagcgcttgatccgtcttcatcctggtcttgattttgatcctggttttgacttttattctgatcgctgtcagtgtcgtcttcccggttcttgttcttgtctttgtctgcgtctccgcttgtgccgttcttattgccggaatcagcggagccgccgtcatttttatttgaacttgtgtttttcttagaagtcagcttgatcttaaccgtgtcttttgacagggaccatgtgacgttttgcgggccgtttacttcaagctttacagagtgctctccgtcatccaagtccgagacattggcatacagttcaatgtccgactttttcagcgccttaatgttggcgggagagcctttggccgtaatatttatcgcctgcgattcaggatcgagaaactcaatctgctgtgagcctcccagtccgaccgtcttgattccgacattgtcaaaatcctttttgtcttcactgtccactttaacatgaagcgtgattttttccggtgataccttagtgacacccttaggaagcgggatatcggcattgatatcggtatctttatcaattttgcctaaatcaagagatacgccgtcaataaattcaagtgaatccagcacatcctgcgggccgtaaaccgtcacctcactcggattcgagtcaatgctcgcaacgctcaccccgtccggaagacttcccttcctttcgattttgaaaggaagctttttgctcggactggctacgggaaccgtcactttaatgactgacggttcaacatcaacaggaagtgcgttgccgtctttgtcatagacggtcaccttcacttccttttcaatggtctcatttgcattttctaggttcacggatgctttgacaagtgaaatgttatcaatcacatttttcgaacctgtaatctgcacgtttttcgggctgataatcggctgctgaggggtgtatccctttttcattttgcttttattgtagtattcaacttccacgggaaaactctcagccgttttttcctgaatcgtaaccgtcgtgactgacgggttaatggagatcgtcagtccgtccgatacgtttttcgccttcaattcgaccttatgagtcccggtcttcagcttattcatatcggcgtatatctcaaaattctttgtctgtctcgcctttttcaccgcgcttgtcgagcctttaatcgtgacatttacggtctggggcacgccggtgacgacatagttcgcttcatcatagtatgcttttacaggaatatcagtaagcgtagcctcgtcagtcgttgatgtcggaaaaaaggattcccccggctttttcggagtcggcgcctggttgttgttaaccgcaacgtaaagcagcagcgcaaagagcaatgcaatgatctttacagcccagcggttgtttaagaatttatccatttttcttgcccctccagtaccagcggttagaagaagtatctctggcgtttttcttaaactcggcttcaagcatttctttcagtgcttcttccgtcaattctctgtgaaggtctccgtttttggccacactgatggcgcccgtctcttcagatacaataatggttaagctgtccgtcacttcactgatgccgacagccgctctgtgacgcgtccccagctcctttgaaataaacgggctttcagaaagcggcagataacaggcagccgccgcaatctcgttatttttcataatgaccgctccatcatgcagcggtgtattcgggatgaagatattaatcaaaagctccgagctgacctgtgcattaagcgggatgcccgtctcaatataatcgcccattcccgtatcgcgctcaatcgcgatgagtgcgccgatgcggcgtttcgccatgtagctgatcgattttgtaatcgcttcaattgtcttatgctgcgcttcctccacgggggttccgctcctggaaaagaaccggccccgtccgagctgttcaagcgcccgtctcagctcaggctggaatataatgatgatcgctaaaaatccccatgttatcgcttggtccatcagccactgaagcgtgctgagtcccaaatatgaactggccatccggaccaatacgatgacgacgattccttttaaaagctgaaccgccttcgtcccgcgtatgaccatgattaatttatatatcacataccaaacaaggagaatatcaacggcattgccgaggtattgcaaaaatgggatgtcctcaaaagccatttcctcgtcctccaagaattcagtcatttcgtttttctgttatgaattgtgctgcatgagcaatatgtacatcatatagcgtgctcattataccacattttgatttctcaagtgaaatgagccagagcggcgatgcacaaaaaaagagtaaagcgattatacgctttactcatcttcactcgggtccaaagcgctcacgacgccctggcccgccgatttcagttcgtaccagacccagtcaaacaattggttaatctcttcaatctgcccggtgacttgtccggctgaggccatgtatttttctccgttgacgacggtcacattgccgtcgacttttccttcaatgaacagcttgccgttttttactgtgacatcgccctttacggtctcgccttcagggacggtgaccgtgtgattctgcacgacaaggttcggctgtttggacacactgaaattgtggtcattatgccagctgttgaaaaaaccgccgcccattaaaatcacaaaaaccgctgcggctgcaatcatcggatgagttttgatccatcgttttacagaagcgcgttttttctcttttggaagattcgccataactttggcagtaaaatcagcaggggccgtgacatgcgatgtgcttcggacgagtgctacggatttctccatttcatgaaaatgccgtttgcaattcccgcatgactgcaaatgttgttttaatacgttttcatcttcaggaaggatatctccatcaagatgcttatgcataagctgcacaatctgttcaggacagctcatttcatcaccccacttaaagatccctcaattgttttctaagagcctctctgcctctgtgtatccttgtcttgacggtgccgacagggatattcagaatctccccgatttcaattaaagagagttcgtcaatatactttaatacaataaccgttctgtacttgtcaggcagctttaaaatctttttctgaattgtgtccgacagctccaatgacaatacggcgtcttcagggagaaccccgtccgcggcgatctgcgaatacatcgtcagcccttctgctcccgctacttctgcgtccagatagtaatcaggctttttcttgcggatgcggtcaatggtcaggttggtcgcaattctgtaaagccacgttgaaaactttctgttgatatcgaaactgtcgatattgacatacgctctgataaaagcttcctgcgcaatatcttccgcttcgtgaacattgccgagcatgcggtagcaaagctggtaaatcttatctttataaaggtcaacgatttctgcaaacgcattttgatcgccttttttgacttgcttgattctttttttaatcaggttttccatgttttatcttacctctgcccttcaccggtctgtatctatacgttgattgttttaaaaggtttcattttttttattacatttattttaccaaatttcaggcagggtgtagatggaaaatacagaatatactgccttaacagcagcttaaaaatagtatatctgatgaacaatcagaaatcgaaacaaaatgctgataaaaaaagacacctttatgcaaaaggtgtctgagactgggctagctggattcgaaccaacgcatgacggagtcaaagtccgttgccttaccgcttggctatagcccaaaaatggtggaggggggcagattcgaactgccgaaccctgagggagcggatttacagtccgccgcgtttagccacttcgctacccctccgtatatttttgaaaaacagtgccggccagaggacttgaacccccaacctactgattacaagtcagttgctctaccaattgagctaggccggcaaatatggtggaggatgacgggctcgaaccgccgaccctctgcttgtaaggcagatgctctcccagctgagctaatcctccatatgacccgtacgggattcgaacccgtgttaccgccgtgaaagggcggtgtcttaaccgcttgaccaacgggccgttgtgtccgcgtcgagctgacaaaagttattatatacaggttgtaccccatttgtaaagaggaaaattattttttttattttcaaacttttttacccgttttttaactgaaaaactcatccctcctctcttatttcatttatgatgaaagtatcaaaatattgaagggaatggacacagatgatcttagtcagctcttgtctcggcggtatcgaatgcaggtataacggctctcacgccgcttcggaaaaaatccgcagactcgtagaagaaaagaaagctgttatggtctgccccgaacttttgggcggcttcaccactccccgcgaaccggcggaaatcatcggcggcacgggcgaagacgtgctgaacggaacagcaagaatcgtaacggcatcaggcgaagacgttacggctttatatatggacggcgcggaaaaaacattagcatacgcaaaagaaataggcgccgccacggtcatccttaaagaaaacagtccgtcctgcggcagcagctttatctatgacggcactttctcagggaaaaaaataatcggagacggcatcacttccgctcttttaaaacgggcaggctgccgtgttctatcagaagatgaattggatcaattataaaaaaggagagtagatatcatggatgtagccctgtccttttataaaccggagcatgcagacggactgaacgggtttgtgctgagtgaagaagataaaaagttcacagctctcccgaaggatgtcctgccgcaggctcttgtcatccgggatcgctacccgacagtcattttaaaagaagaccgccccgtcggtttttttattttacatacctcaaaagaaaccattgccccgtattcgaataatgtgtctgccattttgctgagtgcgctgtccttacatgcgccgcatcagggaaaaggttatgccaaacaagcgatgctgcagctccccgcttttgtcgcaaattactttccttggtgtgatgaaatcgtgcttgctgtaaaccatcgcaatcatcgtgcaaagaacctgtaccggtcttccggttttattgataaaggtcgtcgcaggatcggcccgatcggtgaacagcacattctgcatcattttttgtgaaagcgcttgattattcatctcatccctgccgatttttcttgaaacatctattcagaagcccatatacttcaagtattaacgacttgggagggtacaatcatgacagaccggcttaacattcacagattgaccacagaaaccagaaatccgcagaccgcttcaatccatcaagcagacacgatggaaattctccgcatcattaacgaagaggatttcaaagtggctgaagccgttcagcaggtgctgcccgatattcagattgccgttcaattcgcccatcaatcattacggcgaaacggcaggctgatttatgcgggagcgggcacaagcggcagactcggtgtactggatgcggttgaatgcccgcctacatacagcgtaagtcccgacactgtcatcggtctgatggccggaggagcagacgcctttttgcaagcggctgaaggtatagaagacagcgaggaaaccggcgctctcgatctcaaaacgatcgggcttaccgcagaagacaccgtgatcgccatcgcggcaagcgggcgcacgccgtatgcggccggtgcgctgaaatacgcaaaaacaatcggcgccaaaaccgtcgcgctcacatgcaataaggactcattgatcagcacctttgccgatcacagcattgaagtcgtcgtcggccccgaagtgattacagggtcaacacgaatgaaagcggcgacggcacataaaatgattctgaacatgatttccacggccgtgatgatcaaaagcggcaaagtgtacgaaaatttaatggtggacgttcatgtcagcaacgaaaaattgaaagaacgcgcaatcggcattatccaaagcatcacgggcgttccgtacgacaaggcaaaagaaacgcttgaggccgcaggcagccatgtcaaaacggcaatcgtcatgctgaagacgaattcagacgaaacacacgcgaaggcactgctcaaagaagcagaaggcttcattgacaaagccatagaacagcacgtttcaaaagaaaaagaacgctgatcgttctttggtgaaaaataatgtgcttttacgagcccgcgccgttttcatgatcggcgcaggcgcttttaggacgcgtttcaggcacagctccccgggaaaaatcgcacggaaaaaaggaggatctccatgagcaaagaggcattttatcagtcactggccaaagatatcctggacaattgcggcggttcatcgaatatttcaggctttacccactgtatgacacgcctgaggattacacctttagatcgggacaaaacggatattgaggcgctgaaacggcttgacggggtaataggcgtcgtcgaagccgaaacactgcagatcattctcggcacgggtgtcgtcaatcatgtcgccgacgctttcgcaaaacttatgtcatccggaaaaaacattgatttaaaagaagccgcctcacggaaaaaagccgatctcaacagaaaaaacaccacacccatcagactgtttctgagaaaaatatcaagcatcttcatcccccttattcccgcactcattgcatcaggtttaatcaccggtattacgaaagccgtcattcaggccggctggcttccgaaagaatcccaaatcgcacttattttaacggttatcggttcaggcttattcgcatacctcggcgtccttgtcggcatcaatgcggcgaaggaattcggcggtacacccgcgatgggcggccttgcgggcatattgatccttaaccctgagatcgccaatatcagtttgttcggagagaatctgctccctggcaggggaggattaatcggcgttcttttcgctgcggtttttatcgcttataccgaacggtttatcagaaagtacgtccatcaatccatcgacattatcgtcacgcctacattgtctttacttatcaccgggctggtgacatatgtcgtttttatccctgcaggcggttttatttctgatctcattacatcaggtttattgtcgctgctgaatgtcgggggagtgctctcagggtttgtactgggagccgccttcctgccgcttgtcgtcaccggcctgcatcagggcttgactcccgtacatttggaattaatccgatcaatcggagatgacccgcttcttccgattctcgcgatgggaggcgcgggtcaagtaggggcggccttcgccatctttatgaaaacaaaaaaagcctcattgaaaagagcgatcggcggcggacttccatccggtctgctcggaatcggagagccgctcatcttcggcgtcacgctcccgctcggccggccgtttttgacggcgtgtttaggggcgggaatcggcggcgcctttcaagcccattttcaggtggctactttttcaatcggtgtctccggccttccgctctcgtttctcgtacagccggctcaaatcgttttgtatatcatcggtctcttcatctcttacgcggcgggctttgtcttcacttatgcgttcggatttaaggatgacatggctgctgaatttgaataaaccgggagggatcagaatatgaaaacactgacagccgccatactcacaatggtcatcagcctctcttttctgccgcagcacaaagccgaagcccaatccaaattatacgacgtagcaaagcttagaaaggttgatcaaatgattgaaaaagacatcgcagcaggattccccggagccgtcctcgtcgtcgtaaaggacggacgggtgatcaaaaagaaagcatacggctacagcaaaaaatatgacgggaacgtccttttatcgcgtccgaaaaaaatgaaaacatcaaccatgtttgatctagcttccaatacaaaaatgtacgcggcgaattttgcattacagcgactcgtcagccagggaaagcttgatgtgtatcaaaaagtctcggcttaccttcctgatttcaaagacagaaaaagcgatccgattcaagaaaaagaccgcattcgcgtcatcgatgtgctccagcatcaatccggtctgccggcaagcttttatttctatcagccggacaccgcaggccctttgtattcacaagaacgggataaaacgatccgttttctcactcaaatcccgcttgcatacaaaccgggaacaaaacacgtatacagcgatatcggttacatgcttctcggctgcatcattgaaaacataaccggaaaaacccttgatgcctatgcggaacaagaactgtacaaaccgctgaaactgacgcacacactgttcaatccgctgcaaaaaggctttaaagaaaaatcattcgcagctactgaacgtttaggcaacacacgtgacggagtcatccgtttccctcacatcaggacgtatacgctgcagggggaagttcacgatgaaaaagcattttactcaatgggaggggtgtccggtcacgccgggctgttttccagagctgatgacatggccgtccttcttcaagtcatgctgaacggaggcagttataaacacgtttctctcttcaataaaagaacggccgatttgttcaccacggcggcatcctctgatccgactttcgctctcggctggcggaaaaacggcagcccggatatggagtggatgttcggcccttatgcaagcaggcaggcatatggccatacgggatggaccggcaccgtcacgattattgatcccgcttataagctggggatcgcacttttgaccaataaaaagcattcccccgtcgtcagtcccggtgaaaacccgaatgtttttgaaggggatctttttccgactggaagctacggcagcatcataaaaacgatttatgaagccattgaatgacaacccatgtcttttgtccaaactatgacggcaggagggcaccatcatgaaacttgttatctcagctgtattactgttgttcattgttttcggcacgcatcatgtatcgacaaaaccggacattccgtcacaggcggaacaagcggtatcccgtatgacattagatgaaaaattagggcagatgctcatgcctgattttcgcaattggcaaaaaaaggggcagtcatcacctgaggctcttacccaaatgaataaagaagtcgcagggcttattcaaaagtaccggttcggcggcgttattttattttcagaaaatgtaaaaaacactgaacaaacggtacgcctgacagatgcctttcaaaaggcgagccctgacattccgctattattaagcattgatcaggagggcggcatcgtaactagacttggtgagggcactcatttcccaggcaatatggcgctcggagccgctagaaaaacagcctacgcgtcccagaccggcgccattatcgggaaagaactgaaagcactgggcattaatacgaacttcgctcccgttctcgatatcaataataatcccggaaatcctgtcatcggcgtcaggtccttcagttcagaccgagatctgacagcttcactcggtcttgcctcaatgaaggctcagcaaaagcaggatgtcgctgccgccgtcaaacatttcccgggacacggcgacacggatgtcgacagccactacggccttccgcttgtcacccacaatcaagaaaggctgcgtcagattgaactttatccgttccggaaggccattcaggccggagctgatatgatcatgacagcccatgtgcaatttcccgcgtttgacgatacaacctataaaagcaagctggacggttcagacatcctcgtacccgccacgctctcgaaaaaagtgatgactcatcttctccgtgaggaaatgggctttaacggcgtcatcgtcacggatgcattaaatatgaaagccattgccgatcatttcggccaggaagaggcggtcgtcatggccgtaaaagcaggagtcgatattgccctgatgccggcccaagtgacatcgctgcaaacagaaaaccgctttgcccgggttcattccgcattaaaaaaggcggtacaaaaaggggatattccgctgcagcaaattaacaaatcggcggaacgcatcatttccctgaaaataaaacgagggatatatcccgcaccgaaagagacaaatctgaaaaagaagattgcaaaagcaaagaaaaccgtcggcagcaaaaatcacctgaaagctgaaaaacaaatcgcggaaaggtccgtcaccgtcttacaaaacaaaaaccgcacgctcccattcaaaccgaaaaagaacagccgcgttctcattgccgctccatatgaagatcaaacagcgtcaatggaacaaaccattcggcagctcatcaagaagaaaaaaatccggccggtaaccatcagtaaaatgaacttcgccgagcgcacatttcatgatgaacacaaaaagcagataactgacgctgattacgtgattacaggctcatatgttgtgaaaaatgatcctgtcgtaaacgacggcgtgattgacgattccgtcacagatcccggcaagtggacgactgcatttccgcgggcagtcatgaaagccgcacaatcgaaccaaaaaccctttgtgctgatgagcctgcgtaatccatatgacgccgcgaactttgaagaagctgaagcccttatcgcagtctacggctttaaaggatatacagacggacaatttctccagccaaacattccggcaggcgttgaagcgatattcggacagacaacaccgcaaggcaggctgcccgctgacattccttccgtcacgcatccgggaacgacactgtatccttatggtttcggtatcaatctgaagaccggaaaaccgctttaaacaggaggactgatcatgaaaacacaaacggctgcgcttcttgccggattagtcgtcatcagtgctatgacggcagtctcggcggcttctgacagaaaccttcataccgccaagaaaccaagcatccaaacaggcatcgaccgcctgctgaaagattataaacaggaactgaagggaaaaagggtcgggctgatcaccaacccgaccggtgtgaacaattcattgaaaagcagcgttgacgtgctgtatgaggcaccagacatccacttgacggcattattcggaccggagcacggtgtccgcggcgatgctcaggccggagacaaagtcacatcgtatatagacgaaaaaacagggcttcccgtctacagcctgtacggggaaacgaggaaaccgacgcctgacatgctgaaagatacagatgtgctgattttcgatattcaggatgtcggaacgcgatactacacctacatttatacaatggcctatgccatggaagcggcaaaagaaaaaggcattcctttttatgtattggaccggccgaatccgcaaggcggacgaaatccggacggcccggttcttgaaccggattacgcttcatttgtcggactgtatccgatcccgctgaagcacggcatgacgatcggtgagcttgctcttttattcaataaagagtttcatattggcgccgacctaaccgtcgtaaaaatgaagcgctggaagcggacgatgacgattgaagataccggtctgccgttcgtcctcccttcgcccaatatcccgaccccggacagcatattcgcatattcggcgacaggactaatcgaaggcacaaacgtatccgaaggaaggggcacgacaaagccgtttgaactgatcggcgcgccttatatgaaaagcaccgagctcgaagaacgcctgaacagtctcaagcttccgggcgtcaccttcagagccgcatcatttatccccagcttctccaagcaccagggcaaactgtgccacggcgtacaagtctacgtaacaaacagaaatacatttgaagcggcaaaaacagggctttccattctgaaaaccatgcatgacttatatccgaatgacttttcattcttgccgacaggctcttttgacaagctgatcggtaacggctgggtacgcaaaaaaatagaaaaaggcacttccattgaagacatcaccggcacatatcaacgccggctggaccaattcaaaactctaagaaaacaatacctcatatactgacaacattcgtgttacacgtgtaacattttgacgcatttcacatttccgctttttataggaaaacattcatttatttggtacaatttaaatgataacagttatcatttaaatgaatgtttcctaaaaggtggtttctcatgaaaaacacattattctttcagcccattgatatcatctccgtaaaaaaaacagccgaccttctgtcagagcatcagctcactgattcccccgtattgatctttcatgtgaaaggcgagggacaaattgatatcggaacagacagctttccgctgcagaaggaaacgctctacatctgtccttgtgatgagacattcaatattgcccctataccgtcaggcggcatccatttgtatatcgtcagactccgtgttttctcctattcatcagatgatgaagcgatgcttccggataacggggaagacatcttccacggacttcagcaaatgaatttacaaacggttgatcatttgacaagccggcttcagtcactttctgaaaacgtgcgatcggcggatgcattgcagaaaatgaaatatacagccgactttcagcagctgatgtatgacctttatgccgcaaaagtatgccatcaaaataatacgaaagcggcgatcgaacagacaaaacaattcatacatgctcagtccgacacaaaaatcacgctcacccagctcgctcatatggcgggaatcagtcccaagcattacagtgaaacctttaaaaaactatacgggcagagcgtaactgaatatatcacagacatccgcataaccaatgcgaaaaaactgatggccaaagcaaactgcaaactgcgggaaatcgctcatcaaatcggctaccaagacgaattttatttcagccgcatctttaaaaaacataccggcagctcacctacaagctatatgaaaaaaaggcgcacaaaaatggccgcgtacggaaaagaaacgatggggcatctgattcctctgcatcacgtgccttatgctgcggcgctgcacccgaaatggacggcctattattacaaacaattctcttccgatattccggttcacctgagtgcttaccgctataatgcaaattgggaagagaacctgcacacgctttcccaagctgccccggacatcattttcagtcttgattctgtcagtgaagaagaaaaacagcgcctgaatgacatcactgacgttttttaccttccggctcaagagaattggagagaccagtttcttcgcacagccgcatatttgaatgaagagcaggaagcgcggcactggcttaaagcttatcaaagtctcgcccattcagcgaaagatgctctgaaacacgtgcggcatcagcggttcttatttgtccgtgtatataaagaaaatatgtacatcgcccataacaacagtattgaggatgtcttcttcggtgatttaggctttgcctccgcaaaaccggaatcttttgctcctgacgaaaagatttccttggacatgctggcggattgccaggctgactgcatcatgcttttcacttgtaaagaaccggaaacgcttcgttattttcagcggattcagcagaccgggatatggcagaaccttagagccgtcagcaataaacgcgtgtttcccatatcatctgacccgtggattgaatattctccaagcggacatcagcggatgatcgagcaaagcatttccattttatccgaagatcgtccatggtaatgccggaaattatccatggtcttatccctgttcattctctataattccaattgataatagttatcaattgaacaggaggaacaatagatgaagaaattggcattcgctttcatgattttgcttttggctttcacggccgcggcttgcggaagctcagaaacatctgatacagcaagtaaaggaaaggacgcttcttcagataaaaagaaaatcgaatatctcggaaaaacatatgaagtcaaagcgccgactgacaaaatcgccattacaggcagcgtagaatcaatggaagacgccaaattgcttgacgttcatccggcaggggcaatttctttctccggcaaattcccggaactgtttaaagatattacagataaatccgtatctacgggagaaaaaatgcagccgaatatggaaaaaattcttgagctgcagccggacgtcattctggcatcaaccaaattcccggaaaaaacgttgaaaaaattgagcggcaccgctgaaacgatccctgtctctcatatctcatcaaactggaaagaaaacatgatgctgctcgcccagcttacagataaagagaaaaaagcgaaaaaaatcatcgcagattacgaacaggacctgaaacagacaaaaacaaagatcaacagcaaagcgaaacagtcaaacgcgctggtcatcagaatcagacaaggcaatatttatatttatcctgaacaagtatatttcaactccacgctttacggtgatttaggcctgaaggcgccggacgaagtcaaagcggcgaaagcgcaggaactgatttctcttgaaaaattaagcgaaatgaaccctgaccatatcttcgtacaattctctgatgacgaaaacgcagataagccggacgctttgaaagacttagagaaaaatccgatctggaagagcctgaaggcagtcaaaaaagaccatgtatacgtcaatacgattgatccattagcccaaggcggaaccgcgtggagtaaaatcagcttcttacaggttgcggctgacaaattgactcaagactaataaagagtaggtttttcacatgtatgcaaaacggcggacacacatgattatcattgcttcaccgattgccattgttctgtcactgctgctttccgttttatacggcgcaaagcagcttgacatccataccgtgttctccgcattgctgcactttaatccggagaataccgaccatcagatcatatggcattcaagaatcccgagggctgccggcgctatgtttatcggcgcagcccttgctgtttccggagcgctcatgcagggaatcacacggaactatctggcctcgccttcgatcatgggtgtgtcggacggctccgcttttatcatcaccctttgcatggtattgctccctcaatcgacatccattgaaatgatcatatactcgtttatcggttccgcattcggcgccgctcttgttttcgggctggcctccattcttcccggcggttttaccccggtgcagcttgccatcatcggaacggtgacaagtatgcttctcagcagtctgtcggctgcgctttcgatttattttcaaatttcgcaggatctcagtttttggtacagtgcgagactgcatcaaatgaaccctgattttttgaaactggccgtcccgttttttgcgatcggaatcatcacggccatgattctcagcaaaaaggtcactgccgtatcattaggagacgacatttcaaaaagtctgggacagcagaaaagaaccatcaaactcatggcgatggcggccgttgttatattgaccggaagctcggtggcactcgccggaaaaattgcctttgtcggtttggtcgttccgcacatcacacgttttctcgtcggatcggactacagcaggctgatcccatgcgcgtgcatcatcggcggcgtcttcctgactctttgcgaccttgccagccgattcatcaattatccctttgagacgcctattgaagttgtcacttctatcatcggtgttcctttctttctttatttgattaaaagaaaaggaggggatcagcgtggtgcgtaaaatggccggaatttatatcattctgattgctctcatattgctcgtaagctatttcagcatgacaagcggttctttttccgcaaagccgggtgaactgctcagtacgcttttccgcatccatccgaatccgcaatatgacattttgctgtttcagctgaggctgccgcgcattgtcatggctgctgccatcgggctcggattggggatagccggagccgttattcaggccattaccaaaaacggtcttgccgatcccggtattttgggcattaatgcaggagccggagccggaatcgtcacgtttatgcttctgtttcagggacaatctgaagcgacggcacttgcctctgcgatgggtatgcctgtcttcggcctcatcggaggattgatggcggccgtgctgatctatattttcgcctggcaccgggggcatctggaatcgggcagaattattctcgtcgggatcgccatgaattccggattcagcgcgctgtctttatttctttcattaaaaatggacccgcaggattatgagatggcgatggtttggaaaaacggcagtatctggtcggcaaactggatgaccattacggcgatccttccgtggctgatcgtgttcattcctctgcttatggcgaaaacgtcattgctggataccattcgtttcgatgaggacacggtgaaaagcctcggtgtttcaaccaataaagaaaaaacgattttactcattgcctgcatcgctttgatcagcgcatgtgtaaccgcagcgggcagcatggcatttgtcggactgatcgcgccccatatttcccgcaggctcgccgggattgagcacagatactcattaccggtcagcggattggtcggtatgctcctcgtcatatccgccgactttgcgggcaaattgttctttcagccttcagaagtgccggcgggaattattcttgcgattctcggcgttccttatttcttttttcttctgtttaagcaaaagaaggggctggatgcatgagaggcacccttacagaacaccggataaacggaaaggaatgcactgtgtatcttcctccctcctattcggttcaaacaggggctttaccctgtgtgtacgtactggacgggggttctttgtttttagaacagatggataaacttgaatcccaatttgcgaacggtacacttcccgaattgattttcatcggcatcaaaccggctgacaggctcgatgagtacacgccgtggcccgcgccttccctgagccctgcgtttcatgatttcggcggcaaagggaggctctttctcgaggagctgacaaatgtcatcattccaactgtagaagatatgcatcacatttctgcacatccggaaacaagaggcctgatcggcgcgtcattaggcggactgttttcgatatacgcgatgctgcaaaagcctgaaatattcggcagaatcggttgtatttccggttccttctggtatgaaaaatcagcagattatgtccgctccgcatctttgcgtccggcacgggggcgtatctatatgtctgtcggcagccgcgaagctgagcataaaaacaacatccaaaacaacatgatccgacaaaataaagacgtgcatgaaagcctgaggcaaaaaggcttttctcaatctcagctctctttcactgttgaagaaggcgccgtgcaccatcaagaagcattcaaacgacaattcaatgcagcactaagctggctgtacggaaaaaaccgctcacgtagctgagcggtttttttcatacttcatcacgaccggcttaagttcaaagcgtctcagcaaatagccgaacaaagcggcaaggatttgctgaaaaagcatcccgatgacgaccggaaccgccacttgagacggaaaaaaagaaacggcgagaacggctccggcgctgatattgcgcatgccccccgtataaatcagagacacaatttcatcctggctccgcttcatcagccttccgatcagccaagccacggcataacccgtcatggcaataaaaaataccatgcctgcgatgcccgcaaatttgatatccacgtgcgtgacatacggcgcgatttccgaactgttaatggcaatgacaatcatcagacagatttttgaaaaaggagacagcgaccggcttattgcctgagtccttaccggcggggaaaactggttgactatcatccctgcgatggatggaatcaccaccatctccgccagccctttcatcattccccacacatccatctgaacattcgccccggccaggacagacaggcttaacggtacgataaaaggagaaagcacggtatcaaccaggataatagacagcgtcaatccgacattccccttatacatcgcagcccaaatcaaactcgtaattccggtcggaatcaccacacccataatcagccccgtcacagttaaagggtcaccgctgaaaatcagatggccgcttccccatgcaaaaacaggcatgaaaatatgcagaacaaacaatgccatgatcatcggtagcggcttctcgatactgcgcttcagcgaatgaaaattggcactcagactgcccgtaaatgtaataaatgcaaatatccacggcacagcgccggccatccagctgatatgctgagataacagcacacccgccgccacacttgacggagtcaaaagcggcatgattctccccaacacttggttcaacttctgaagccacatcatatgcaagtctcctatatacggttttcaagtctcattcattataacaatgcaccccggcaaatttaaccgaaaaaaagcccggatatattcatccggacttcacaaattctatgccatttgtttcattaaatctcggcttttctgatttaatccctttaattcagcctcaattccgtattctttacatttggcgacaattttctcaagagccgccgctcccgaatcatcccacacgtgggcgtcggtcaaatcaatgacaatccgtttcacgtcttcatcataaacgatggcattcatgagctcagacacggaagcaaaaaagatctgtcccgttaccttataagttctgacatctttctgttcggaatgtgacacaatcttcagcttagaaattttcgccgtaaaaaagatcgcgcttagcagcacacccgcgaagacaccctttgataaatcatttgtcaggacgaccgtcatgacggtaataaccataacgatcgaatcagtaaggggcgctttccgcaaacctttaatcgatgaccagtcgaacgtgccgatggacaccataaccatcacggccaccagcgcagccatcggaattttcacgacgataccgcttaatacggcaattaaaaacattaaaaacgcgccggcggtaaaagccgataatcggccgcgtccgccggctttcgtattaatgacagactggccgatcatggcgcacccggccatgcctccgaaaaatccgttcacaatattggcgatgccttgtccgcggctttctttgttcttatcactatccgtatccgtcatttcatcaatgatctgggctgtcagcaatgactcgagcaatccgacgaaagcaagcgccagagaatacgggaaaataatccgcaatgtctcaaacgtccacggaacatccggtatcaagaaatgcggaagtgaacttgtaatcccgcccatatcaccgaccgtgcggacatccgcatggaagaccaccgcaatgatcgtcatgacaataatcgccaccagcggagacggcacagccgtcgtaaccttcggcaatagatatatgatagccagtgatccggcaagcatggcgtacatgacccatgaggctcctttgaactggggcagctgcgcagaaaaaatcaagatcgccaaagcattcacaaatccgatcatgaccgaacgcggaataaatttcatcaatttcgctatcttactgacaccaagaataaattgaataatacctgtcaaaatggttgccgcaaacaaatactgcagcccgtaatcagccaccaatgtcaccatgacaaccgccattgaacccgtagcggctgaaatcattcccggtctgccgccgaagatagaaataataatcgcgatacaaaatgatgcataaaggccgaccatcggatcgacacctgcaataattgaaaatccgatcgcctcggggatcagagcgagggcaaccagaataccggccagaatgtctttacggacattcccgaaccattgctgctgtaacgtataatctttcaaatgataacgactccttttcactataaaaatccgcaccctatcagttggaaacattgattttcatctggggaatatgaggcaagcttacggggaaaaagaggacacgctcagagtataatgtcgttgaggaaaggaattgtgaacaaagagtatcatattaaactttaaagaaatgtgcaagaccctataaataagaaaagaaaacgactctcactggagccgtttccgcttttataaaagttccggatcagacacaagaatcgtttttattgcgctgatatcctttctttcttttgtcaccgggtcgatgcccatgagatgatcaatggcttcttcataattcttcagttccgtcttttccgtaataagatcatagagctgcggaaggtcggacgcgcatgctaacgcggcttccatgatctggcgggcttcacctgtgcctacaatcgtcacgccgtttgacagcagctggtacggcctgaccgtcatctcatacgtatcatcaaagcccatcggcacgattctgcctcccttttcaataaaaggataagcccaatcaagctgattgccgattgcgtcaaaaatcacatcaaattttcttccttgattaatccgtttcacttcatccacggttaatgcttcagggtggtagacataatccgatatccggctcgccgcctcgcttcggaaactgcctatttcagtcgcaaccgtcaatcgcgccagttttttcaccatcatttgcacaagcagtccgatcggtcccgaccccaaaaccaagaccgagtcctccggctgaatcgaagccttgtccacaacattcagcacacaggagagaggctcaaccaatgtggcccgctcccattccattgaatccggaattctgtacatgaacctgtcttcccccacgtaatattccgcaaacgttccgtgcgccccgattccgagctgccaatcctcgaaggtttcgcaataacacgtcagccctctccggcaataatgacatttcccgcaaaactgcgtaggatctatcacgacgcggtctccgacttttacatttgtcacgtccggtccgatttccacgaccgctcccaccgattcatgccccataatcatatgatgggttgcattcatttttcctttcagcacatttaagtccgttccgcagataccggtgccgaaaattttcactttcacatcattggatttccgaatttgaggctcgtccacctcttgatattcaagcttatcattaggagtccagaccaacgccttcatatttctcttcctttctgccccagcggatttggtctaacaatgtttgatgaagctccttcgttgatgccgcaatacatgattgctgattctgataacttaaatctgtcagaagcgtttcgtccaaagaccggccgtacgcatccgtaatgaccactcccgccttcttcgccaaaaagacgcttgcggcaatatcataaggaaacaaatgcagcacctctccgttcccgacctgctgaaaatctgaaagcagcttcggatcatctttcagcagacgattgccgatatccacataagcatccatctgccccgtgataattcgtgaaatcgaataagaagcgctgttgaaaacaaaaaccccgccattattggccgactggtcaatcagatggccgtatgcgtccgtcatcagctgcgccggatgcccgttaaattcaaggctccaaaacatatttttaatatcccgcactccgctcaaattcggcaattctccatgatacccttcaaaatgaatggcatcgctgtatatatcaccgtacatataagcgcctgatttcaattcaagtaaaaaagcaaactcgatatccttaatctttgcgtttggcttatacgaagcaagcgcaatcgaaatacacgacatttcaagtcctgcggcggccgggcgcgttccgtctatcggatctacaattaaaatatattgcggatcttctccaatcagcttcaggccgccatcctccgtgtaaaaagcaaccggatggcccttttcttgaatataatccagcaccgcctcctcagcagcggcgtctatgttaaattgggcgtcgcctcccggagaatagccatttacgagccggtttttcagcgtgcctttttgatttttcaccttttgataaacaaattgtccaagctcaatgatatagtctctcacttgatttcctccaatagcttgcgaagtctgtagcagagcacttcggcttcactaagtgttatggttaaaggcggacggattttaaagacatttccgaatccgtaacgggatgtccggagaatcagcccgtaatccattgcccgttttgcaatataattggtcagctccacatccggttcattgttctctttaacaatctccacaccgatcataagaccgacgcctcttacctcagaaataaaagcgaaatcctctttcatcgtttctaagcgatccataatataatgaccgaccgtcgttacattttccaaaaatcccggtcgctgcatgatatctatggttttacaagcggcagcggcggccatcacatttgagccgtatgtgaaggagtgcgtataccccggaagcccggtatacttgtcctccgtcagagtggcggcgacttggaaacctgtgcccccgagcccctttgctaccgtcatcatattaggtttcacatcgaagtggtccgcggcaaacattttacccgtccgtccgaacccggtctgaatttcatcaaaaatcagagcgatatcatgttcatcacaaagctgtctcagctgtttaaaatactctttaggcggaacgacgtttccaccgtttccggatatcggttcaataatcatggcggcaatttttccattgctcgcatactcaataaaatcattaattctttctacgcacagcataccgcatgaatcaggtttctgattataaaaacagcggctgcaatagggatcggggacttgcaggccaaaagaaatttgcggcgggaaaggttcttttctgaatgagttgccggacaaagcggaagtcatatacgtttgtccgaggtggcttcgaaataaggagatgacatcggtttttccggagtaatactgagccattttaatagctccttcatttgcaccggaaccgctgctgactttagggtgtacttttgtgagattatcgggggcgatttctactagtttttctgccagtttatttacggcgtctgtttgaaaagatgatgttacatggatgagcttatcggcttgttctttaaccgtatcaatgacctctttgttaccgtatcctaaattcaagttaaacgtggcagaggcgcaatcaatgtactcatttccctcttgatcgtacaggtaaatcccttctccgcgctccattactacatcgtcaacactgtaatacaagctgtctggattcgtgatttccttcgttcccacaaataccacccctatgaaattattagaatttcgctttttatcgtataaattattgaaaataatgtcaacgatctttcttgtaaaaaatgttaacaatttgttaacgttaccataatggatgtacgagaaaaagttatgtgatatagtaacaatacttggattttttgtaaaaacatcatgtcatacgagtagagagaaatatgattttaccaataaggagataaaatgatgaaaactcgtctgctgtggataagctgtttttcttatggatcgattgcttttacacttgttattctgggagccgtactgcctgagttactcacacattattcacaaagctacagtaatggcggagtattggtattctctcagttcatgggctttctcatcggtgtcatcggaatgccatacatggtgaaaaagcttgggcgcaaaaacgtcgttatctttggcctggcactcatcagctgtgaaatgttcatcaccttcctgccgccctggccgctgctctttcttctcgtcagcatcgcagggcttggcgccggattggtggaatcctgtgtaggcacgatcatcctcaccgctattaaagaaagacaggctgtggccatgagcaagatggaagtggcctacggattaggtgcgctgttcatgcctctgctctcaggctttcttatcaacaaccacatgtggacaattgcttttttagtattagggttatccagttttgcactcttaatcgcatggaagcagatgagtttcggcagtattgatcagcttctcatccgcaaagaggtctcttccgatgacactaaaaaacaaagcaccggttatcggtcacacggattgctgtttattgccttggcgggtgcttacttcttcttttacggcggcagtgaagtttccattgtacattttatcccctccatcttcgctgagaaatgggatatccccaactctttggcaacgataacagttactgtgtattggacggggatgatcataggaagattattaacaggcccggtatcagaaaagctgacatatcaccgttatctccgtctcataagcattggcggtctggctgcacttactgtattagcattaagcaaaaacgtatggttcggttttgccctttgcttctttttagggctgttcatggcaggcatgtttgcaatagccctaatcatcacgaatcatttttatcccggaaagacagaaacgactaccagtattctgctcgcttcaaacggattaggaggttcactccttccgatcgccgtcggctggagcttagatgaatatcccgtacaaactgcgttctggctgtttactgcactgatgctccttatgctgctgattgtgttcagtttaagaatgctcgagacaataaaatcaaacaatcttcaacatcacaacagcaaagcaaaatcaatgtaaacaaaaaagctaatgcctttcaaaggcattagctttatatatctatgtgatctttcatataaaaaaccaagttcatcatgaacttggttaagatagcttggcggcgtcctactctcacagggggaaacccccgactaccatcggcgctgaagagcttaacttccgtgttcggcatgggaacgggtgtgacctcttcgctatcgccaccaaaccattgagagtgttctctcaaaactagataacagtaagcatacattcaaattggttaagtcctcgatcgattagtatctgtcagctccatgtgtcgccacacttccacctcagacctatcaacctgatcatctttcagggatcttacttccttgcggaatgggaaatctcatcttgaggggggcttcatgcttagatgctttcagcacttatcccgtccgcacatagctacccagcgatgcccttggcagaacaactggtacaccagcggtgcgtccatcccggtcctctcgtactaaggacagctcctctcaaatttcctgcgcccgcgacggatagggaccgaactgtctcacgacgttctgaacccagctcgcgtaccgctttaatgggcgaacagcccaacccttgggaccgactacagccccaggatgcgatgagccgacatcgaggtgccaaacctccccgtcgatgtggactcttgggggagataagcctgttatccccggggtagcttttatccgttgagcgatggcccttccatgcggaaccaccggatcactaagcccgactttcgtccctgctcgacttgtaggtctcgcagtcaagctcccttgtgcctttacactctgcgaatgatttccaaccattctgagggaacctttgggcgcctccgttaccttttaggaggcgaccgccccagtcaaactgcccacctgacactgtctccccgcccgataagggcggcgggttagaaggtcaatacagccagggtagtatcccaccgatgcctccaccgaagctggcgctccggtttccaaggctcctacctatcctgtacaagctgtaccaacattcaatatcaggctgcagtaaagctccacggggtctttccgtcctgtcgcgggtaacctgcatcttcacaggtactataatttcaccgagtctctcgttgagacagtgcccagatcgttgcgcctttcgtgcgggtcggaacttacccgacaaggaatttcgctaccttaggaccgttatagttacggccgccgtttactggggcttcaattcgcaccttcgcttacgctaagcgctcctcttaaccttccagcaccgggcaggcgtcagcccctatacttcgccttacggcttcgcagagacctgtgtttttgctaaacagtcgcctgggcctattcactgcggctctctcgggcttgcaccctaacagagcaccccttctcccgaagttacggggtcattttgccgagttccttaacgagagttctctcgatcaccttaggattctctcctcgcctacctgtgtcggtttgcggtacgggcacctctcacctcgctagaggcttttcttggcagtgtggaatcaggaacttcgctactataattcgctcgccatcacagctcagccttcacgggaaacggatttgcctatttcccagcctaactgcttggacgcggatatccaataccgcgcttaccctatcctcctgcgtccccccattgctcaaatggtgaggaggtggtacaggaatatcaacctgttgtccatcgcctacgcctttcggcctcggcttaggtcccgactaaccctgagcggacgagccttcctcaggaaaccttaggcattcggtggaggggattctcacccctctttcgctactcataccggcattctcacttctaagcgctccacaagtccttccggtcttgcttcacagcccttagaacgctctcctaccactgttcgaagaacagtccgcagcttcggtgatacgtttagccccggtacattttcggcgcagagtcactcgaccagtgagctattacgcactctttaaatggtggctgcttctaagccaacatcctggttgtctaagcaactccacatccttttccacttaacgtatactttgggaccttagctggcggtctgggctgtttccctttcgactacggatcttatcactcgcagtctgactcccaaggataagtcatcggcattcggagtttgactgaattcggtaacccggtaggggcccctagtccaatcagtgctctacctccgagactcttaccttgaggctagccctaaagctatttcggagagaaccagctatctccaggttcgattggcatttcacccctacccacacctcatccccgcacttttcaacgtgcgtgggttcgggcctccattcagtgttacctgaacttcaccctggacatgggtagatcacctggtttcgggtctacgaccacgtactcaattcgccctattcagactcgctttcgctgcggctccgcatcttctgcttaaccttgcacgggatcgtaactcgccggttcattctacaaaaggcacgccatcacccgttaacgggctctgactacttgtaggcacacggtttcaggatctctttcactccccttccggggtgcttttcacctttccctcacggtactggttcactatcggtcactagggagtatttagccttgggagatggtcctcccggattccgacggaatttcacgtgttccgccgtactcaggatccactcaggagagaacgaagttttgactacagggctgttacctcctatggcgggcctttccagacctcttcatctacctcgttcctttgtaactccgtacagagtgtcctacaaccccaagaggcaagcctcttggtttgggctggtcccgtttcgctcgccgctactcagggaatcgcatttgctttctcttcctccgggtacttagatgtttcagttccccgggtctgccttctcatatcctatgtattcagatatggataccactccattacgagtggtgggtttccccattcggaaatctccggatcaaagcttgcttacagctccccgaagcatatcggtgttcgtcccgtccttcatcggctcctagtgccaaggcatccaccgtgcgccctttctaacttaaccgttaaaaagaatcactacgtgatatcttgcattactaattgaatgtgaattacttctgttatctagttttcaaagaacaacgcataggacatgctaacacatgcgttgccacaggaagtggcgcatttagcaggtgttcctatgttttgaaggaatgatccttcaaaactaaacaagacagggaacgttctgtttataagacccaaggtcttatattccgttaaaatccttagaaaggaggtgatccagccgcaccttccgatacggctaccttgttacgacttcaccccaatcatctgtcccaccttcggcggctggctcctaaaaggttacctcaccgacttcgggtgttacaaactctcgtggtgtgacgggcggtgtgtacaaggcccgggaacgtattcaccgcggcatgctgatccgcgattactagcgattccagcttcacgcagtcgagttgcagactgcgatccgaactgagaacagatttgtgggattggcttaacctcgcggtttcgctgccctttgttctgtccattgtagcacgtgtgtagcccaggtcataaggggcatgatgatttgacgtcatccccaccttcctccggtttgtcaccggcagtcaccttagagtgcccaactgaatgctggcaactaagatcaagggttgcgctcgttgcgggacttaacccaacatctcacgacacgagctgacgacaaccatgcaccacctgtcactctgcccccgaaggggacgtcctatctctaggattgtcagaggatgtcaagacctggtaaggttcttcgcgttgcttcgaattaaaccacatgctccaccgcttgtgcgggcccccgtcaattcctttgagtttcagtcttgcgaccgtactccccaggcggagtgcttaatgcgttagctgcagcactaaggggcggaaaccccctaacacttagcactcatcgtttacggcgtggactaccagggtatctaatcctgttcgctccccacgctttcgctcctcagcgtcagttacagaccagagagtcgccttcgccactggtgttcctccacatctctacgcatttcaccgctacacgtggaattccactctcctcttctgcactcaagttccccagtttccaatgaccctccccggttgagccgggggctttcacatcagacttaagaaaccgcctgcgagccctttacgcccaataattccggacaacgcttgccacctacgtattaccgcggctgctggcacgtagttagccgtggctttctggttaggtaccgtcaaggtgccgccctatttgaacggcacttgttcttccctaacaacagagctttacgatccgaaaaccttcatcactcacgcggcgttgctccgtcagactttcgtccattgcggaagattccctactgctgcctcccgtaggagtctgggccgtgtctcagtcccagtgtggccgatcaccctctcaggtcggctacgcatcgtcgccttggtgagccgttacctcaccaactagctaatgcgccgcgggtccatctgtaagtggtagccgaagccaccttttatgtctgaaccatgcggttcagacaaccatccggtattagccccggtttcccggagttatcccagtcttacaggcaggttacccacgtgttactcacccgtccgccgctaacatcagggagcaagctcccatctgtccgctcgacttgcatgtattaggcacgccgccagcgttcgtcctgagccaggatcaaactctccgataaagtagtttgactgactacgcacatcgctgtgcgatttatttaaaactttgaattaacaggtacgttttgtcttgtttagttttcaaagatcattaccgcttgttgaagcagctttattatcttaccactcagcttcttttatgtcaacaactttttttacgttgttcccgaagctttttgttgttgtctgctgttcatcagcgacgtttaataatataccacggtgtctctctataaatcaagcatttttttaaaaaaggagaaaaaaagaaaaccagtatattatctttaaagtttgagaatggtcgggaagacaggattcgaacctgcgaccccatggtcccaaaccatgtgctctaccaagctgagctacttcccgatttttaaatatattatggcgcgcccgagaggagtcgaacccctaaccttttgatccgtagtcaaacgctctatccaattgagctacgggcgcaatcaatttcacaatatcccgttgggataaaatggagcggaagacgggattcgaacccgcgacccccaccttggcaaggtgatgttctaccactgaactacttccgcaagtaaaaatgtaatgtacagccagaatacagcatcagataacccaaaaactgtattgttatttattcagtaaaactccaaacggtataacccgcagattaatctaaagcatactgttcattatgacaaaagtaattatatcaaggttttgataaaagtcaataccgtttaacaattaattatgttaatctcttttgcatccttaaagaaaggcttcatcagaagacgcgctaaatacctataccttaactgatacaatcagcaacagatttttactgaactaaacaaaaaataacagtcccataacaagcggaaactgcttcagatcaacgtatttagataagcttccaagcgggctcgaaccgctgacctcttccttaccatggaagtgctctacctgctgagctatggaagcaatggctccgcaggtaggactcgaacctacgaccgatcggttaacagccgatagctctaccactgagctactgcggaatattataagcttcataaacaaaaacatggtagataaaataaaaagcttggcggcgtcctactctcacagggggaaacccccgactaccatcggcgctgaagagcttaacttccgtgttcggcatgggaacgggtgtgacctcttcgctatcgccaccaaaccattgagagtgttctctcaaaactagataacagtaagcatacattcaaattggttaagtcctcgatcgattagtatctgtcagctccatgtgtcgccacacttccacctcagacctatcaacctgatcatctttcagggatcttacttccttgcggaatgggaaatctcatcttgaggggggcttcatgcttagatgctttcagcacttatcccgtccgcacatagctacccagcgatgcccttggcagaacaactggtacaccagcggtgcgtccatcccggtcctctcgtactaaggacagctcctctcaaatttcctgcgcccgcgacggatagggaccgaactgtctcacgacgttctgaacccagctcgcgtaccgctttaatgggcgaacagcccaacccttgggaccgactacagccccaggatgcgatgagccgacatcgaggtgccaaacctccccgtcgatgtggactcttgggggagataagcctgttatccccggggtagcttttatccgttgagcgatggcccttccatgcggaaccaccggatcactaagcccgactttcgtccctgctcgacttgtaggtctcgcagtcaagctcccttgtgcctttacactctgcgaatgatttccaaccattctgagggaacctttgggcgcctccgttaccttttaggaggcgaccgccccagtcaaactgcccacctgacactgtctccccgcccgataagggcggcgggttagaaggtcaatacagccagggtagtatcccaccgatgcctccaccgaagctggcgctccggtttccaaggctcctacctatcctgtacaagctgtaccaacattcaatatcaggctgcagtaaagctccacggggtctttccgtcctgtcgcgggtaacctgcatcttcacaggtactataatttcaccgagtctctcgttgagacagtgcccagatcgttgcgcctttcgtgcgggtcggaacttacccgacaaggaatttcgctaccttaggaccgttatagttacggccgccgtttactggggcttcaattcgcaccttcgcttacgctaagcgctcctcttaaccttccagcaccgggcaggcgtcagcccctatacttcgccttacggcttcgcagagacctgtgtttttgctaaacagtcgcctgggcctattcactgcggctctctcgggcttgcaccctaacagagcaccccttctcccgaagttacggggtcattttgccgagttccttaacgagagttctctcgatcaccttaggattctctcctcgcctacctgtgtcggtttgcggtacgggcacctctcacctcgctagaggcttttcttggcagtgtggaatcaggaacttcgctactataattcgctcgccatcacagctcagccttcacgggaaacggatttgcctatttcccagcctaactgcttggacgcggatatccaataccgcgcttaccctatcctcctgcgtccccccattgctcaaatggtgaggaggtggtacaggaatatcaacctgttgtccatcgcctacgcctttcggcctcggcttaggtcccgactaaccctgagcggacgagccttcctcaggaaaccttaggcattcggtggaggggattctcacccctctttcgctactcataccggcattctcacttctaagcgctccacaagtccttccggtcttgcttcacagcccttagaacgctctcctaccactgttcgaagaacagtccgcagcttcggtgatacgtttagccccggtacattttcggcgcagagtcactcgaccagtgagctattacgcactctttaaatggtggctgcttctaagccaacatcctggttgtctaagcaactccacatccttttccacttaacgtatactttgggaccttagctggcggtctgggctgtttccctttcgactacggatcttatcactcgcagtctgactcccaaggataagtcatcggcattcggagtttgactgaattcggtaacccggtaggggcccctagtccaatcagtgctctacctccgagactcttaccttgaggctagccctaaagctatttcggagagaaccagctatctccaggttcgattggcatttcacccctacccacacctcatccccgcacttttcaacgtgcgtgggttcgggcctccattcagtgttacctgaacttcaccctggacatgggtagatcacctggtttcgggtctacgaccacgtactcaattcgccctattcagactcgctttcgctgcggctccgcatcttctgcttaaccttgcacgggatcgtaactcgccggttcattctacaaaaggcacgccatcacccgttaacgggctctgactacttgtaggcacacggtttcaggatctctttcactccccttccggggtgcttttcacctttccctcacggtactggttcactatcggtcactagggagtatttagccttgggagatggtcctcccggattccgacggaatttcacgtgttccgccgtactcaggatccactcaggagagaacgaagttttgactacagggctgttacctcctatggcgggcctttccagacctcttcatctacctcgttcctttgtaactccgtacagagtgtcctacaaccccaagaggcaagcctcttggtttgggctggtcccgtttcgctcgccgctactcagggaatcgcatttgctttctcttcctccgggtacttagatgtttcagttccccgggtctgccttctcatatcctatgtattcagatatggataccactccattacgagtggtgggtttccccattcggaaatctccggatcaaagcttgcttacagctccccgaagcatatcggtgttcgtcccgtccttcatcggctcctagtgccaaggcatccaccgtgcgccctttctaacttaaccgttaaaaagaatcactacgtgatatcttgcattactaattgaatgtgaattacttctgttatctagttttcaaagaacaacgcataggacatgctaacacatgcgttgccacaggaagtggcgcatttagcaggtgttcctatgttttgaaggaatgatccttcaaaactaaacaagacagggaacgttctgtttataagacccaaggtcttatattccgttaaaatccttagaaaggaggtgatccagccgcaccttccgatacggctaccttgttacgacttcaccccaatcatctgtcccaccttcggcggctggctcctaaaaggttacctcaccgacttcgggtgttacaaactctcgtggtgtgacgggcggtgtgtacaaggcccgggaacgtattcaccgcggcatgctgatccgcgattactagcgattccagcttcacgcagtcgagttgcagactgcgatccgaactgagaacagatttgtgggattggcttaacctcgcggtttcgctgccctttgttctgtccattgtagcacgtgtgtagcccaggtcataaggggcatgatgatttgacgtcatccccaccttcctccggtttgtcaccggcagtcaccttagagtgcccaactgaatgctggcaactaagatcaagggttgcgctcgttgcgggacttaacccaacatctcacgacacgagctgacgacaaccatgcaccacctgtcactctgcccccgaaggggacgtcctatctctaggattgtcagaggatgtcaagacctggtaaggttcttcgcgttgcttcgaattaaaccacatgctccaccgcttgtgcgggcccccgtcaattcctttgagtttcagtcttgcgaccgtactccccaggcggagtgcttaatgcgttagctgcagcactaaggggcggaaaccccctaacacttagcactcatcgtttacggcgtggactaccagggtatctaatcctgttcgctccccacgctttcgctcctcagcgtcagttacagaccagagagtcgccttcgccactggtgttcctccacatctctacgcatttcaccgctacacgtggaattccactctcctcttctgcactcaagttccccagtttccaatgaccctccccggttgagccgggggctttcacatcagacttaagaaaccgcctgcgagccctttacgcccaataattccggacaacgcttgccacctacgtattaccgcggctgctggcacgtagttagccgtggctttctggttaggtaccgtcaaggtgccgccctatttgaacggcacttgttcttccctaacaacagagctttacgatccgaaaaccttcatcactcacgcggcgttgctccgtcagactttcgtccattgcggaagattccctactgctgcctcccgtaggagtctgggccgtgtctcagtcccagtgtggccgatcaccctctcaggtcggctacgcatcgtcgccttggtgagccgttacctcaccaactagctaatgcgccgcgggtccatctgtaagtggtagccgaagccaccttttatgtctgaaccatgcggttcaaacaaccatccggtattagccccggtttcccggagttatcccagtcttacaggcaggttacccacgtgttactcacccgtccgccgctaacatcagggagcaagctcccatctgtccgctcgacttgcatgtattaggcacgccgccagcgttcgtcctgagccaggatcaaactctccgataaagtagtttgactgactacgcacatcgctgtgcgatttatttaaaactttgaattaacaggtacgttttgtcttgtttagttttcaaagatcattaccgcttgttgaagcagctttattatcttaccactcagcttcttttatgtcaacaactttttttacgttgtttccgaagctttttgttgttgtctgctgttcatcagcgacgtttaataatataccatgcattctttaaatttagcaagtgtttttttcgttttttttaaaacgtatttcgttatattcatctccgccgcggcatacgatgtaatcaagcatggacaagataaggaggcgtcatcagtgaatcacttctacgtgtggcacatcagaaggataaaacagctgcttattattatcattgccgcatttgcagcagccagctttttttatatacagagagccgtcccccttcctgtatttttaactgatagcggcccaaaggctatttcaaaaggggagacgagagcgggggaagtcgcattaacattcgatatcagctggggcgatgaaaaggcggttccgattctgaacgcgctaaaagcaaacggtattaaaaacgctactttttttctgtcagcttcttgggcggaacggcacccggacacagttgaacgtatggtaaaagacggacatcaaatcggcagcatgggatatgcgtataagaattataccaacctagaggacaatgaaataaaaaaagatatcctccgggcccagaccgcatttaaaaagctgggtgtgaagaatgttcatttactccgcccgccgaccggacaatttaataaaaaggttcttaccattgcacagcagtaccactattcagtggttcattacagcgttaactcgcaggattggacaaatcccggccctgataaaatcattgaaaatgtaaacagtcatataaaaggcggcgacattgtcctgctgcacgcatctgattcagcaacacagactgaagaagcgctccccgccatcattcacaatttaaagcaaaaaggactgaaaaacgtgaccgtcggcgacctgatcgcaaatactgacgtcaagtcatcagaagtgaaataattacctctgggcaaacttcggcagcattaacagctgaaacgcattgcagcccatcagcggaatcagcatcaaataaagccagtcctcattattcactcgtagcgcaggaacccattcaagcgctgtaataacgaccattaaaaataatgatgaaacgaacgtattttttgaggactgcttttgttttatatacgccgtcaacaggccgacggcaagcagagccagcggcagccagacaaaccccgcaatcgagtcatcccgctctccgaaaaacaaaaatctgacgtacattaaatcaaaagcgacaaacagaatgataaacagctgaagcagattccaaagcgagcttgatctgagaatttcaagggcaaaccggtgcaccgtcagaaaaacgaagaatcccatctggctgatcacactgaaaatcatgcccaccccgataaaccagatcagaacggagaaaatctgaccggcctcaaaattcagaaagaaccccttgtactccccccacttcagagcaaatcccacgacgcttgtaataagagcgcccacagctaaaatcgaaaagaaaaatcgaacaagcccgcggcttttcatctcttattcatccccctgacaatcgcgttcagcgatattttgttatgtataaatccattccgatgaatcatattaaaaataagtacaagtaaggaaggagcttatgcatgtcaaaagccaaaacgctattgataagctgttttgttttattatctgtaacagcttgtgctccaaaagaccaagcagcggatatggattatgaccagactaaaaaaatggttgttgatatattaaagaccgatgatggaaaaaaggcaattaaggaaatattaaatgatgatgcgatgaatgaggcattggtgattgatcaaaatgccattaaaggcacaatagagaaaaccctcacctctaaaaaaggggcggagttctggaaaaccatttttgaagactcaaaattcgccgagagctttgcaaaaactcttcagcccgagcatgaaaaaatcataaaaaaactgatgaaagaccctgattatcagaaaagttttatgcagatcatgcaggaccccggcatggataaaaaatactatgagctggtgaaaagccaaaagttccgcagttacttagaagatgtaattacagagacactttccagcccgcttttcaaaaagcaattcgaggatgaattgaaaaaagcagcttcaagctctgaaaaagaaagccaataaaaggccgggccgtgttgatcccggccccttttttattcagctgttttttcaatgactttctgggcgatccccatataaatttccccgatcggatgacttctgtcatagacagaaggcgcaaactgatccttgtcccaatcaggctgttttaaaggaattctgccaagcagcggcacttgcaattcctctgcaagcttatctcccccgccttgaccgaacacatattctctctcgccggtttttgcactttcatagtaagccatattttcaatgacccctacaacttcatgatcggtcttaatcgccatagaacccgctctcgccgctacaaatgcggctgtagggtgcggcgttgatacgataatctctttgcagctcggaagcatcgtgtgtacatcgagcgccacatcaccagtgccgggcggcagatcaagaacgatatagtcaacctctccccagtcaacttcatggaagaagttattcagcatcttgcccagcatcggccctctccacacaaccggagcgttttcttcgacgaaaaagcccatcgacataacctttactccaaatctttcgacaggaagcagtttttctccttctactgtcgggcgaactgtaatacccatcatgtccggcacgctgaatccgtatatatccgcatcgatcaagccgactttttttccgagccgcgcaagagaaatggccaggttgacggaaaccgttgatttgccgacaccgccttttccgcttgccaccgcaagaaagaccggcggatgtttcctattcagcagggtttcgctttcagcagccggccggctgaatttcgccaatgtttcttccggcagctcttcaaaccgcagtcccacagtttccgcacccgcttctttcagaacggatacgatttcctgctgaatacccatctgttcagccgtccccgtttttgccaatgcaattttcacactgacatgccgtttttccggcttgatctttacttctttaatggcatccaattctcccagcggtctatgaagaaaaggttcgcgcatgtttccgactatatttcttacttcatcttctcttatcatcgaaccctcaccctttgtgtattcgtttacaaatggtattataccatatattaaacatagaatcggcgaaaaaccctccttactcgggagggtctcctttctctgtgaagtatctcaatacgcccttatacacggaagaagcgattttgtcctgatatttgggctggccgagccttttcgcttccgcgggattggacagaaatccgatctccaccagcgcgcccggtttggttacattctgcattaagtaaatgccgtgtatccgtttcgcctttctcgttgtattctccaaattgattctcaattcgtcctgtatatattttgccactttttcattttcttcgtattttccatagtagaagctttgggcgccgctccatctcggtgacggtatggcgttcagatgaatgctgatataaagctccgcctctgaacggttgatgatttccacgcgctttctcagatcttccgctttgcgtctgctgtagcctttcgtcccttcaggagctaaatcagtatccgtctcccgcgtcataatgaccaaagctccctgctcctgcaaatagtctctgaccctggaggccacttcgagagtaatgtccttttcaaggtgactgcctcccgtggcgcctccgtccggcccgccgtgtcccggatcgagatagatgattttcccgctcagcggcagactccacggccgccaggaatcatcattatggaattgaaaccggaataaacacaataatatgataaagccaagtaaaaaaccgagccatttcagcttttttgtcatacctttccctcccgcttgtccccgttattaataagtatgggacaagggaagaaattatgattacctcatgcggagcttacattgtttttctctttgcagaaatccttccgtccaccagctgttgataaaccggcaggacgcttcatagatttctttttgttcaacggaagaatattgctcatgcgtccaattgcaaagatattcaaaaaaatcgaccgtcagttcttcctcttcttcagccgaacgggcgtttgccctctgcaaggactcaccataatagccaaagacgccgaaccggccgcctaataaatacgcttcaattgcaaaatctatgcatccttcactcagaatgccgttttcgtcttgaagaaagggaaacaaaggggtaagacatgcttttacggactgaatgatctgcgtcagtgacagctcctttagtaaactcttctcaagctcaaaatccttctgccgtttcacgtctgaaaaagataatacttctgccattgccagccacgctcctttttactgttattttgaaaggaaaagggaaaaagcatgctttgttgatagtggaaatcctcccaaatgaaggagttttatgttaactggaagaagaaagagctgaggtgacgtgatgaaaaagctgtttcaatacaattggacggtgcgtgacgagtggtttatgatatgtgaaaagctgagccgggaggaactgacgaaaacccggacgggcggaatggagagcatcttgcggactttatttcatatcattgatgtcgagatcagctgggctcgtgccattttaggtaaagatgatgttttacctgctgagtctgactatacaagcattcaggatctcagaaagctgtctgaacagtatcgggaggatgtcattcatgcggtctccctcaaaggaccggatcttgttaagccggactggatggaccaaacctttcctaaagaagatattctccgccacatccttgcgcatgagattcaccatatgggacaactgtcggtttgggccagagacattggaatagaaccggtttcggctaatgtgatcagccgtccgcaggaaaaagccgcaaaaaaacagcacctctgacgggatgccgtttttatattttaatgcttcttgttacggagtatgtattaatgtattcatccagcacgaggccgcctttgtcctcgtaaaaaccggcaaccatgaagcctgcgtcaatctgacctttaatttgatcctccagcgtatggccgaattcaagcgcttcatgattatcaataagttcctttacctttttcttactcagatctttttcatccgaaaacggaatggaatactttacttttagtacgccttcctgctctaaatccatatcaaataagaacacgacgggatttacaaaaccggagactaaagacccgccttttttcaatacgcgatgagcttctttccataccggaagaaccgtatcaacaaagcaattcgataccgggtgcacgataaaatcaaatgactcatcatcaaaacagctcagatcattcatgctgcctttgacagtccgaagcgtaagatcgtcccgcccggcaaccattctgtcttgcgcaagctgtttttccgaattgtcaaagatggtcacatccgctcctgcagcagcaaggaccggcccttgctgtcctcctcctgaagcgagacaaagaaccttcagaccgtctatgggcggaaaccaatcagccggcacatcttttccgggggtcattctgatgctccaattgccttttttcgcttcaccaatcgtatgagaatcaaccgcaaccgtccattcattgcctgtttcgacttttttatcccatgccttgctgttatgtatgactaacttattcattataactgcgctccttattggtaatgaatagagtataacaaacaattctagaaaaacatcggataacctcttgaatatgagaaaaaaatacaaaaaaaccacaaccaaaaagttgtggtttttgccatccaaaacgattaacgttttgagaactgaggtgcacgacgagcgcctttaagaccgtattttttacgttctttcatacgagcgtcacgagtcagaagaccagcacgtttaagtgttgcacggtattctggatctgcttcaagcaaagcacgagcgataccatgacggattgctccagcttgaccagataagccgcctccatgtacgtttactaaaacatcataagtaccagctgtttcagttaaagttaatggttgtttgatatcttcgattagagctggagatggaatgtgctcgctgatttcacgattattaacgacgatacgaccttcacctggaactaagcgcacacgcgctacagaacttttacgacggccagtaccgtaatattgaacctgtgccaaattggtaacctcctttttaattaaccgcgaagttcgtaaacttcaggtttttgtgcttcatgtggatgctcagaaccacggtatacgttcaatttcttgaacatttgacgacctagagaaccttttggaagcatgcctttgatagcaagctcaagcattttctcagggtagtttgtacgcatttcaagagcagttcttgattttaatccgcctggatgttgagtgtgacggtagtagattttgtcagttaactttttaccagttaactcgattttttcagcgttgatgatgatcacatgatctccagtatcaacgtgcggtgtgtaagtcggtttgtgtttcccgcgaaggatagatgcaacttctgtagaaagacgtcctaaagtcttgccagcagcatcaacaactaaccacttgcgttcaatagtacttgcgttagccataggtgttgtacgcattgaatttccctcctaaatgatctgtcattttcaataatcttcgattacgttctatttcacaacacaataagttccggggcttatcgtggggttgaaatacataccatatgatatcttataactttatgcagactctgtcaagaaaatgttacacctggtttagttgtcatagcaaacgctccataaatacagcccgtgccccggtgcggtgcgccccgcggcttcacgatccttcgcttcgagcattgcttttacatcatcgggagaaaattttccagctcctgtatccaataacgttccggcaatgattctgaccatattatagagaaaaccgtttccggtgatccgcatctgcaggccgtctccggtctcagtccaatccagctcgtaaattgttctgactttatcctgaaccgcggtatcagccgcgcaaaagcttgtgaaatcatgtgtcccgacgaggtgccttgaagcttccctcattttctgcacattaagcggatatgcaaaatggtaagcgtaatgtcgtttaaatacgtccgggtgtttctccgtatatacaaagtagcgatattccttttggaccgcgctaaatcgtgcatggaacccatcatccgcaatctctgctgttttgacggcaatatcatcaggcagcagggcattgagcgcaaacggccatttctcagccgggatggacagcggcgtatcaaaatgaatgacctgcccggcagcatgaacatcgctgtccgtgcggccggatgagatgacaggcactctgccgtccgttttatggatgacggccagcgctttttccaattcactttgaacggtccgctttccaggctgaacctgatatccgttaaataaatgcccgtcataagcaatggtacatttcactctcattcagcagcacctctaacttcttaagaaaaacaataacacggctaataccatgatgagcagaatagctccggtatcctttccggtccagacgagctttctgtatttcgttctcccctcaccgccctggtagcctctcgcctccatggcgaccgcgagctcttccgcgcgtttaaaggcgctgacaaacagcgggacaagcagcggaacaaccgctttgattctgtctttcaccgggccgcttgtaaagtccgcacccctcgccatttgcgccttcatgattttatctgtctcttccatcaatgtcgggataaatcgcaatgatatcgacatcatcaatgcgagttcgtgtacgggcagcttcacctttttaaaaggattcaggagctgctccattccatccgttatttcaatcggcgttgttgtcagcgtcagcagcgtcgtcataaagataaggtaaacgaaacggagggagataaaaataccctgtataagtccgccctcatacactttaaaccagccaagctgaaaaatgacagatccttcatgcgtcatgaaaatgtgtaataaaaaggtaaacgccacaatccagataatcggcttaagccccttcagcaaaaagctgaacggcacgcgagtcaaggcgatcaccccgaatgtaaacaaaccgagcaaagcatacgtctgtacgttgtttgccaaaaagacgatacatacaaaaagaaaaatgctgacaagttttgttcgcgggtccaatcggtgaataagcgatgatccgggaacatactttccgataatcatgctgtccatcattggtccttttcctcctgaaagaaagccttaatttcactggcggcatcctgcagggtcagcatgggtttttcacacttgactccgagagccttctcaagccgtctctgaaacttcaccgattcaggaagatccagtcccatttcggccatctcttcaccttttacaaacaagtcacgcggactccccgtcgctttaatggttcctttgtgcatgacaatcatttcgtcagcatagcgggcggcgtcctccatgctgtgggtgacgagaacggtagtcaggtttccccgctgatgaagcgcatagaacatgtccataatgtcctggcgccctctcggatcaagaccggccgtcggttcatccaaaaccagcacttccggctccatcgcgagaacgccggcaatcgccactctgcgcatctggccgccgctgagctcaaatggtgaacgatccaaaatgtcttccggaaggcccacaagccccagcatttcttttgctttccgttcagcgtcttctttttttacaccaaaattcatcggtccgaatgcgatgtccttcagcacagtctcttcaaacagctgatgttcgggaaattggaaaacgattccgactttttttcgcaaagtcttaaggtctttattctttttaccggctgccagaatcgtactcccgagttcaaactgtcctttagtcggtttcagcaaaccgtttaaatgctgcaggagcgtcgatttgcccgaccctgtatgcccgatgacggcaacgtagctgccctcttttatcacggcattgatatcatacagagccagccgttcaaacggtgtcttcatttgatagcggtgttctacatctttgattttaatgtccacagctcattcaccagcccttcctgagtcagatggtttttcgttaacgccagtccgctttctttcaaaagcaggctgagctggaatgagaaaggcaaatcaagaccgatgcgaaccaagtcttcgtttaatttaaaaatctcttcaggcgtgccctctgcatatttcctgccgccgttcatcacaatgatcctgtccgcccttgcggcttcttccaggtcatgtgttatcgaaatgacggtggccatgccctgatcttttaagcgtctgacagtatcaaggacttcttctctcccaatcgggtcaagcatggatgtcgcttcatccaaaatcataatatcaggacgcgcggcaataatccccgcgatcgccactctttgtttttgacctccggagagatggtgcggctcttgatcaagaaaatcctgcatattgacttgtgtgacagcccaatctactctctcaatcatttcttcgcgcggaacaccattgttttctaaaccaaaagccacatcatcgcgaacagtcgttccgacaaattggttatcgggattctgaaagaccatccctattttttttcgcacatcccacacggtatcctcagtcagtttgatgccgccgacttcaatttctccggcctcgggcaaaatcagcccgttcagcgctctggccaaagtcgacttccctgaaccgttgtggcctacgatagcaagccattctccttcgtatacctccagactcacaccgtccagcgccggtctttctgcatctttgcggtaacggaatagaatgtcttttacggatataagctgtttttgatccacgggcgcctgacctcctctcagctatagctctgcttttctgtctcatgatcaaaagttctgatatctaaaaaaagggcatagatccagttagaaactgtcccgcccttctttagatacacaaaaatatgtgattaaaccaattcgatgattgccattggtgcaccgtcaccacggcgaggaccaagcttcataatacgtgtgtatccgccttggcgctcctcgtaacgagttgcaatgtcagagaataatttttgaagtgcatcttggttattttcttcattagcaacctcgttgcgaatgtatgcagctgcttgacgacgagcatgcaagtcaccgcgcttaccaagagtgatcatcttttcaacaacagagcgaagttctttcgcacgtgtttcagttgtttcaattctttcgttgatgatcaaatctgttgtaagatcacgaagcatagctttacgctgtgaactcgtacgtcctagttttctgtatgacatgtgatgtcccctcctttaatggaatgctgtttctaaataaaaaacacacgaaaatcctagttcacatggaaactagatcaatcgtctttgcgaaggccgagtccaagttcttctagtttcgctttcacttcttcaagtgatttgcgtcccaggttgcgaactttcatcatatcttcttccgtcttgttcgcaagttcttgaaccgtgttaatgcccgcacgcttcaagcagttgtaagaacggacagaaaggtcaagttcctcaatcgtcatttcaagaactttttctttttgatcctcttctttttcaaccatgatttcagcatgctgagcttcgtcagttaaaccgacgaatatattaaggtgttcagttaaaatctttgaaccgagagcaattgcttccttcggtccagtgcttccgtcagtccaaacatcaagtgtaagtttgtcatagtttgcaacctggcctacacgagtgttttctacctgataagataaacgagaaactggcgtaaagattgaatcgatcggaatcacgccgattggctgatcgtctcttttgttcgaatcagcaggtgtatacccacgtcctctttgtgcagtaaggcgaactcggaaactcgcattctcaccaagagtcgcaatatgaagatctggattaaggatttcaacatcgctgtcgtgtgtaatatcagctgctgtgacagttccttcgccctgtacatcaatttcaagcgtcttctcttcatcagagtagattttcaatgcaagctttttaatgtgcaagattatcgttgtaacatcttccacaacgccttcgattgtcgagaattcgtgcagtacaccatctatctggatcgatgttacagcggcaccagggagtgaggataagaggatacgacgtaaggagttacccagagttgtaccatatccacgctcaagcggctctacgacaaacttaccaaatttggcatcgtcgctgatttcaaccgtttcgatttttggtttttcaatctcgatcattacttaaaaccctccttcaaaacgtcgaaacctcgaatagaatcatatgagattccatccgaaattccccattgtttagtcccgtatgtgctcaggcaacgagtcggtgcattcgtttcataaataactgtatcataacccattattgacagggacacaaaatctatacaaacaaattacacgcggcgacgttttggtggacggcatccattatgaggaacaggagttacgtctctgatagctgtaacttcaagtccggcagcttgtaaagcacggattgcagcttcacggccagaacctggtcctttaacagttacttcaagagttttaagtccgtgttcgattgaacctttagcagctgtttcagcagccatttgcgcagcaaaaggagtagatttacgagaacctctgaatcctagagctccggcacttgaccaagaaagagcattaccatgagtatcagtgatcgtaacgatcgtgttgttgaaagttgaacgaatatgagcgattcctgactcaatattctttttcacgcgacgtttacgcgtgttttgtttacgagcagcagccattgtttaggtacctcccttacttattttttcttgttagctacagtacgacgcggacctttacgagtacgcgcattgtttttagagttttgtccgcgaacaggcaaacctctgcgatggcggattccgcggtagcttccgatttcgatcagacgcttgatgttaagagaaacttcacggcgaaggtcaccttctactttcagtttgtcaataacatcacggattttaccaagttcttcttcagtaagatcacgcacacgagtatcttcagaaacaccagcctctttcaagacttgctgagccgttgtgcggccaattccgaagacatatgttaaagaaataacaacacgtttgtcacgtgggatatctacaccagcaatacgagccattctctgggcacctccttattaattatccttgtttttgtttatgctttggattttcacagatcaccattacttttccttttctgcgaataactttacatttctcgcagattggtttaactgatggtctcactttcatgtgtttccaacctccttcagtttccggagtgctttatttgtaacggtacgtaatcctgccacgagttaagtcatatggagataattctaccgtaactttgtctccaggtaaaatgcgaatgaagtgcatgcggattttaccagatacgtgagccaaaaccgtatggccattttcgagttcaactttgaacatcgcgtttggcagtgtttcgacaatcgtaccttccacttcaattacatcgtctttcgccattcaagtgttctcccttcttcaaatcagtaacttgctctctgacaaatttcaaaagagaaaatctcagttatccgtttgtcacacgccctgtttcgtttatactgttctgaacttccggagatacgcaatcataaagggtgaatgattgatattctatttctaaggagaatgaaatgtacgcttttctccgtctgctttagtacacgatgatgaatcttcattccggtgacagcagctagccggtttttcttccgaccaattgtaaacctacaatctgcccaggtgcggaatgaaaaacatgtgtcatggaattcatttcatcatctagacttttgtcagtatatcaaaacccgtttccgtaatcgcaatcgtatgttcaaaatgagcacactttttcccatctaccgttacaaccgtccagttatcagccaatgttttcacatatcggctgccagcgttaaccatcggttctatagcgagaaccataccaggcttcagcctaggtcctttgtttggcggaccgtaatgaggaatttgcggatcctcatgcaagtcttgaccaacaccatgtccgacatactccctaacaactgaaaactgctcattttcgacatacgtttgtattgcgtgggaaatattcgacaaacgttcacctggttttgcttccttcaagcctttatataaagactcctctgtcacttccagcagtcgtttatcatcatcactgatgtttcctaccggatatgtccaagcagagtcaccatgataaccatttaatttagcaccgatatcaatgctgataatgtcaccgtcacgcaaaacccttttaccgggaattccgtgaacgagttcttcattaactgatacacagatgctcccgcgaaacccattataccccttaaaagatgggattgcaccctgcttctcaataaaacgttcggcaatttgatccaattcttttgtcgagattcctggtttaatgtgctttttcatctcttcatgagtcaaagccacgattcgccctgcttcccgcatgatgccaagctcacgaggggtcttacagataatcatttgctcaatcctccaagaagctctttcacatctttgtacacgtcgttaatgtcctgctggccattgacgttgacaagataccctttctcagaataaaaatcgagtaaaggctgagtctgcttcatgttgacctcaagccgttttgagacggtttcctcattatcatctgcccgttgataaaggtctcctccgtctttatcacaaacacccggcgttttcggcggattgaaaaccaaatggtaggttgtgccgcaaacactgcaaattctgcgtccagtcaaacgttccattaaagagtctttgtctactttaatgttaatgacataatcaatcggcttgccgtattcctcaagaatgttttcaagagcttcagcctgagcgactgttcgcggaaatccgtccagaagaaaacctctttcacaatcatctttgccgagtctttctttgacaatgccgattgtgacttcgtccggtacgagctcgcctttatcaatataagactttgcttcgagtccgagtggtgtttcttctttcatagcagcacggaacatatctcccgttgagatatgaggtatcccataatcctcaacaattcgttctccctgtgtgcctttaccggctccaggaagtcccattaagactaagttcattcggatttcccccgtcctctcttattaagaggaatggttaaaaccagtcctctaatttttcataaatcctcggtaattacgtttcactaactggctctccagctgcttcattgtctccaaggctaccccgacgacaattaacaatgatgttccgccaatctgtgcactttgaggcaatccagcgaattgaatgaaaaagataggaagaatggaaatcacggctaagaatatagaacccacaaacgtaagtcgatacaaaatgctcgtaattctatcttgagtcattttccctggacgaacccccgggatatagccaccctgttttttaaggttatcagccatttgttcagggtttacctgcacaaaagcatagaagtacgtaaaggcgataattaatgcgacataaaccgccatgcccaccggatgtgtattgtcaaagttggcttgaatccactttgtcacatcgttctctccgaaaaatgacgcgatagtacgcggcgtaataagaaacgcaaccgcaaagattaccggaataacccctgccggattcactttaagcggaaggtgagttgactggcctccgccaacaggtgaacgaccttgcccttttgcatattgaatcgcgattttgcgtacggcctgctgaatgaaaataacaccaacaataacggccaaaatcgcaatcaccaataaagcgatttttacaatatgaataaacagctgatcgctgctgccgacaaattgagtctcataaatctgcccaacagttttcggaatactagccacaatccccgcgaagatgatgatcgaaattccgttacctactccattggaagtaatttgttctcccagccacattaaaaaagcagttcctccagtgagtactaaagcaataatcagatatgtcgatatgccggatttttcaatcagcataccgtttgccaggttgttaaacccgtaagacatacctaatgcctggataaaaccaagcacaatcgtaaaatatctcgtgaactgagctaatttacggcggccgacttcaccttgcttagaccactcggtaaacttcggcacaacatccatctgaagcagctgaatgatgattgaagcagtgatgtaaggcgtaattcccatcgcaaatatggagaactgataaagcgcaccgccgccaaatgtattaaggagatcaaaaacccccatcgaactttgtgtctgcaacgcctgagcatttacatatggcacagggataaacgcacctatgcgaaagacgataagcatgagtaatgtaaaaatgattttattccgaatatcactcacacgcataaagttggagattgtcttaaacaagttagatcacctcagctgtaccgccagcagcttcaacagcttctttcgcagaagcagagaatttattggcttttacagttaattttttctctaatttaccgttgccaagaatctttactcctgcattaagtttgctaataacaccagtctcaagaagaagttcaggagtgacttccgttccttccgcaaaaccgttcaatttgtctacgttcacaatagcgtaatccttacggttgatgtttgtaaaaccgcgtttaggaagacgttggaataaaggcatttgtcccccctcgaatccagggcgtacaccgccgccagaacgagcgttttgacctttgtgacctttaccagctgttttaccgttaccagaaccaataccacgacctacgcgattgcgtactttacgtgaaccttctgaaggctttaattcatgaagtttcattaggacacctccttagcctataatttatttttattgttctttaacagaaactagatgagacactttattaatcataccgcggatcgcagcgttatcttcatgaacgacagtttggtttgttttctttaaaccaagtgttcttacagtaacgcgctgatcttccgggcgaccgattacactgcgtttgagggtaatttctaatttagccattaatgttccctccttatcctaacagttcttctacagattttccacgaagcttcgcaacctcttcggcacgtttaagctcacttaaaccttgaagtgttgcacggatcatgttgatcggtgtgttagaacctaaagacttagaaaggatatcagcaacgccagcaagctcaagtaccgcacgtacagggcctccagcgataactccagtaccttcagaagcaggtttcaacaagatattgcctgcaccgaaacgtccgatgatttcgtgtggaatcgtagttccaaccattggtacttcaatcaaattctttttcgcatcttcaacagctttgcggattgcttcaggtacttcttgtgctttaccagtaccgaaacctacgtgaccgtttttgtcaccgacaacgactagagctgcgaaacggaaacgacgaccacctttaacaactttcgctacgcggttaaccgtaactaagcgttcttctaactctaatttgcttgggtcaatacgacgcataatcatgtgtccctcctttttttattaaaatttcagtccggcttcacgagctgcatcggccagagcttttacacgtccatggtataagtatccgccgcggtcaaatactacgtcagaaacacctttctcagaagcgcgtttcgcaacgagttcaccgactttagcagcagcagcgctgtcaccagtgctttccacgttcaaatctttatcgagagtagaagcactagcaagtgtaacgccatttacatcatcgatgatttgagcataaatgtgtttgtttgaacggaacacattcagacgaggtctttcagctgtgcctgaaagtttagcacgaacacgggcatgtcttttttgacgagcagcatttttgctagttttcgtaatcatccttaggtcactcctttcttcactttaagcggtcttacttagcagatttaccttctttacggcgaacaacttcaccttcgtagcggattcctttacctttgtaaggctctggagaacgtacagcgcgaatgttagcagcgatagctcctacacgctctttgtctgtaccttttacaactactttagtttgagaaggaacttcgatttcgatgccctcttcaggaacgatctcaacaggatgagagtatccaacgtttaaaacaagtttgtttccggatttagccgcacgataaccgacaccgactaattccaaacctctttcaaatcctttagatacgccttcaaccatgtttccaagcagactgcgagtcgtaccatgcagcgcacggtgctctttgtgatcagaaggacgagtaactgtaagcacgttgtcctcaattttgatttccatatcaggatggaaagtacgagttaattctccttttggtccttttacagctacagtgttgccttcgttcagcgttactgtaactccagaagggatctcaagcagttttttacctacacgagacatactaaaacacctccattcttgttaaacttcttaccaaacgtatgctagaacttctccaccagcttgttttgcacgggcttctttgtccgttaaaacaccttgtgatgtagaaataatcgcgattccaagaccgttaagtacgcgaggtacttcatttgatttagcgtatacacgcaaacctggtttgctgattcttttaagaccagtgataacgcgctcgttgttttgtccgtatttcaagaaaacgcggatgataccttgtttgctgtcttctacgaactcaacgtcacgaatgaaaccttcacgctttaaaatgtcagcaatttctcttttcaatttagaagcaggaatttcaagcttctcatgacgtaccatgtttgcattgcgaatacgagtcagcatatctgcaattggatctgtcataaccattatataattacctccttcccattcttggggattaccagctggcttttttcacgccaggaatttgtcctttatatgcaagctcacggaaacaaatacggcaaagtttaaatttacgaatgactgagtgcggacgtccgcagcgttcacagcgagtgtactcttgcactttaaactttggtgtacgttgttgtttcgcaatcattgactttttagccacgatttcgcctccctttcattgattatttctggaacggcatacctacttgagttaatagctcacgagcctcttcgtcagagttagcagtcgttacgataacgatgtccattccgcgaacctttgttactttatcgtagtcaatttcagggaagattaactgttctttgataccaagagtgtagtttccgcgaccgtcgaaagatttcttagaaatcccgcggaagtcacgtacacgcggtaaagatacagaaataagtttatcaaggaaatcatacatgcgctctccgcgaagagttactttcgcaccgataggcattccctcacgaagacggaatccagcaattgatttcttcgcacgagtaacgacaggtttttgacctgcgataaacgttaattcttcaacagcactgtcgattgcttttgcgttttgaacagcatcaccgacacccatgttgattacgattttttcgatttttggcacctgcataacagagtcgtagttgaacttcgtcattaaagcaggtgaaatttctttattgtacttttctttaaggcggttcatgagatagacctcccttcctttaaatactatttatctaagacttgcccagatttttttgcaacacgaacttttttgccatcttccactttgtatcctacgcgagtcacttcacctgttttaggatcgagcggcataacgtttgatacatgaattggcgcctcttgattagaaataccgccttgagggtttgcttgagttggtttagagtgcttcttcaccatgtttacgccctcaactagaacgcggtcctttttagggaaagcagcaaggatcgtaccttgtttgcctttatctttaccagagataaccattactttatcgccttttttcacatgcatcctgatcgcacctccttgagtaaggcatttatttcattagataacttctggagccagagaaacaattttcatgaagttgttttcacgtaattcacgggcaaccggtccgaagatacgagttccacgcgggctcttgtcgtcacggatgataacacatgcattctcatcgaagctgatgtatgatccgtcagttctgcgtgctccgctttttgtgcgaacgataacagctcttacgacttcaccttttttgacaacgcctcctggtgttgcttgtttaaccgtgcaaacaattacatcaccaatgttagccgttttacgtccagaaccgccaagaactttaatagtaagtacctcacgcgcaccggagttgtcagcaacttttaaacgagtctcttgttgaatcattatttgttacctcccttcggaaaaagaattccgaactttattagataataacagcttcttcgacaacttctactagacgaaaacgcttagttgcagataatggacgagtttccatgatctttacgatgtctccgattttagcttggttattttcatcatgtgctttgaatttctttgagtattttacgcgtttaccgtaaataggatcctttttgtatgtttcaacaacaacagtgatggttttatccattttgtcagaaacaacacggccttggtaaactttgcgttggttacgttcgctcatgctcacgacctcccctcagtgattatttgttggcagcaatttctctttcacgaatcacagttttcatgcgcgcgatagctttgcgcacttcacgaatgcgagcagtattttcaagttgtcctgtcgctaattgaaagcgaagattgaaaagttcttctttaagagactttactttttgttcaatttcagcagtggtaaggtcacgaatttcattagctttcatttgattcaccaccaatttcttcacgttttacgaacttcgttttaattggcaatttgtgagatgcaagacgaagagcttcacgagctacctcttcagacacaccagaaatttcaaataaaactttgcccggttttacaacagctacccagccttcaggagcccctttaccggaacccatccgtacctcaagcggtttagcagtgtaaggttttgaagggaaaattttaatccaaactttaccgccacgtttcatgtaacgagtcatcgcaatacgtgcagcttcgatttggcggtttgtgatccaagaagcttcaagagcctggataccgtactcaccaaaatgtacttcagtaccgcctttagcgcgaccgcgcatttttccgcgatgctctctgcgatatttaacgcgttttggtaataacatattattttcctccttcctcagttttcttcttagtaggaagaacctctccacgatagatccagacttttacaccaagcttaccgtaagttgtgtcagcttcagatgttgcatagtcgatgtcagcacgtaaagtgtgcaatggaacagttccttcactgtagtattcagaacgagcaatgtcagctccgccaagacggccggaaaccattgttttcacaccttgtgctccagcacgcatagtgcgttggatttgttgtttctgcgcacggcggaaagaaatacggttttctagttgacgagcgatgttgtcagctacaagctgagcatcaagatctgctcttttgatttcaagaatgttaatgtgtacacgcttgccagtaaggctgttaagggctttacgaagtgcttcaacttcagatccgcctttaccgattaccataccaggcttagcagtgtggatcgtaatgttaacgcggtttgctgcgcgctcgatttctactttagaaacagaagcgtcagaaaggcgtttgctaatgaattcacgaatttttaaatcttcgtgcaggaagtcagcgtaatctttaccagcgtaccacttagattcccaatcacgaatgactccgatacgaagaccgactggatttaccttttgacccactacttatccctccttcttttctgatacaacgattgtaatgtggctcgtacgtttgttgatttggctcgcacgtcccatagcacgcgggcggaatctttttaacgttgggccttcgtcaacaaatgcctgagaaataaccagattgttagcgtccatctcgtagttgtgctcagcatttgcgatagcagattttaaaactttttcgatgatcggagaagcagctctcggagttaagttcaggatagatactgcttcgcctacttgcttacctcgaatcaggtccattactagacgtgctttacgaggagcaatacggactgttcttgcaacagctttagcttgcatttaaaagcctcctctcttagcgtcttgtttttttatcgtcactggcgtggcctttgtaagtacgagtcggtgcgaattcgcccaacttgtggcctaccatgtcttcagaaatgaatacaggcacgtgtttacgtccgtcatatactgcgatagtgtgaccgataaattgtgggaaaatagttgaacggcgagaccaagtttttacaacttgtttcttgtccgtttcatttaatttctcgatttttgtcatcaagtgtccatcgacaaatggtccttttttcaagctgcgagccattttggaacctcccttcgtgattgcactacggtccgaaatgaaccgtagacaaccccattatttatttttacgacgacgtacgataaatttatcagatttgttctttttcttacgtgtcttgaatccaagagtcggtttgccccaaggagacattggtgatttacgtccgattggcgcgcggccttcaccaccaccgtgcgggtgatcgttagggttcattacagaaccgcggactgtagggcggatgcctttccagcgagagcgtcctgctttaccaacgttgataagttcgtgctgctcgttacctacttgaccgatagaagcgcggcaagcagaaaggatcatgcgaacttcaccagagttaagacgtacaagaacgtatttgccttctttaccaagaacctgagcagatgtaccagctgaacgtacaagctgtccgcctttaccaggttttaattcaatgttatgcacaactgtaccaacagggatgttgataagcggaagtgcgttacctactttgatgtcagcttcagggccggacatgatttcagtacctacttgaattccttttggtgcaagaatgtaacgtttttctccgtctacatagttgattagtgcaatgttagctgaacggtttggatcgtactcaactgtagcaacgcgtccaggtataccatctttatcgcgtttgaagtcgataacacggtattggcgtttgtgtccgccaccttggtgacgtacagtcaatttaccttggttgttacgtccgccttttttgtgaaggggcgcaagcaaggatttttccggctggtcagtcgtgatttcagcaaaatctgaagttgtcatgccacgacgtccgttagaggtcggtttatactttttaatcgccattttgaatttccctccttctttttacagataattaagcttcaaaaatttcgatttctttgctgtctgcagtaagttttacgatcgcttttctgcgacggctagtcataccagtgtagcggccgacacgttttgatttccctttgtagttcatgatgttgactttgtcaactttcactccaaagatactttcaactgcatctttcacttctgttttattagctcttacatcaacttcaaaagtatatttcttttcagtcattaaatcagcagaacgttcagtaatgacggggcgcttaagaacatcacgaggatctttcattatgcaagcacctcctctactttttcaaccgcagcttttgtaatcagaagcttctcgtggttgacaacgtctaacacgttgattccgttagcttgaacaactgtaactccagggatgttgcgtgcagaaagagatactgcttcgtttgcatccgcagttacgattaaagcttttttctcaacagataatcctttaaggatagctgccatttcttttgttttaaccgtatcaagagtaagatcttcaagaacaataatgttgttgtcgttcactttagaagacaatactgatttgattgccaagcggcgaacttttttaggtaatttgtaagaatagctgcgtggtgttgggccgaatacgacaccacctccgcgccattgcggtgaacggattgaaccttgacgggcacgacctgtacctttttgacgccatggtttgcgacctccgccgcgtacttcagaacgattttttactttgtgagatccttgacgtaaggaagctctttgcataagaatagcgtcgaatactacgctctcatttggctcaattccaaatacagacgcgtttaattcgatatcaccagcagtagaaccgttttggttgtataatgctacttttggcatgatcaatttcctcctttcctaagagacttatttagatttaacagcacttttaacagtgattaaagtttttctcgcaccaggtacgttacctttaatcaaaagaagattgcgctcagcatctacttttacgatttcaaggttttggacagtgatttgatctccgcccatgcgtccaggtaatagtttacctttgaatacacggttaggatctacaggtcccattgaaccaggacgacggtggtagcgtgaaccgtgagacataggtccgcgagattgtccgtggcgcttgattgcaccttggaaacctttacctttagatactcctgttacatctacgatttctcctgcagagaaaatttcaaccttgacttcctgaccaatttcatacgcatccatatccacgccgcgtaattctttaacgaagcgcttaggagcagtttccgcttttgcaacgtgtcctttttccggtttgtttgaaagcttttcacgcttatcgtcaaaaccaagctggatcgcttcatagccatcattttcagctgttttcttttgaagaacaacgtttggagctgcttcaataacagttaccgggataagatcaccgttctctgcgaatacttgcgtcataccaatttttcttcctaagattcctttggtcattcgtcacacctcctattaagatcattctatattttagaattaaagtttgatttcgatatcgacaccagatggtaagtctaatcgcatgagagcatcaacagtttgtggtgttgggttcacaatgtcgattaaacgtttatgtgtacgcatttcaaattgctcacgagaatctttgtatttgtgcaccgcacgaaggattgtgtaaactgatttttcagttggcaacggaatcggaccagatacgctggcaccagaacgttttgccgtttcaacaatcttctctgcagattgatcaaggattctatgatcatatgcttttaaacgaatacgaattttttgttttgccattattttccctccttttcgcctacatcacgttagacagttctccgtgagaaaaacctgatcaccttgccatggcaaagcggccgggtgtgtcagcaacctctcacttcatcgcagtcaaagaccaacatacactattatacagaaaatagacgcatgttgcaaggtttatttaaagaaccttgtggttttcacactttgattattatacaggtgataccatgattaatcaaggatatgcctgttttctttcagagatggaacgatgcgaaccggctgacaacttcggcaaagcgatccggttcctccaagtgaggcgaatgggctgagttctcaaaccaatgccattctttatacggcgcatcaaccttctgataatattcataagacgtcgtccccgggaccgtcaaatcgtatctccctgacataaaacagcacggtattataatagaagaaactgattctccggcatcaaagaaaatgagatcctcccacaggtgtttcaggctgaacatttgcccccgcgcggctaagaagctccccctcacaccgtacggttcaccaaacagcattcgcccccctgctttaagagcaccgatcggatgatgggtaaagccccctcccctcatctcgatacaaagcagaaataacgatcgctgcagctgtttctcccatggaggcgctccgataaagcgcagcgtcttttccagcaggaaatgtttgcgttgcctgctccattccatcatcagccggtaagcttccatttcttccttttgaatattaaccacctgactgataccgatatacccataatacaaatcaggtctctcttgaagaacatgaagcgccagaactgacccccacgaatagccggcgatatatattttttgcctgctgaattgcttgcataagcgttcagtcaaatgaatggtatcggctgtcagctgatccaaggtcatagatgagcccggaatttcctttgaataagagagacccgcccctctctgatcccagttcacaacggtgaaatgcttttccagcttattctggtattttctcgcatagccgatttgaggagtgccgggaccgccgtgcaaaaacaaaagcagcggattactcctgtcatcaccattaatcataatggtttgttcactgccattaatcagcaattgctgaagcattgaaatacgattggttttcttgaagttatcgttcatcggtctgctcctaaaatttgtatacgttctattatacatggaatcagcggggaaacaaaaaaacgaggccccataagggaccccgcattaatgaacgagtcgattactcagtgattgtagaaacaacgcctgaaccaactgtacgtccgccttcacgaatagagaaacgagttccttcttcgatagcgattgtagagataagttcaacgatcatttcagtgttatctccaggcataaccatttctacgccttctggaagattgatgataccagttacgtcagttgtacggaagtagaactgaggacggtagttagagaagaatggagtatgacgtccaccctcttctttagaaagaacgtaaacttcagctttgaatttgctgtgtggagtgattgtacctggtttagcaagtacttgtccacgttggatgtcttcacgagctacaccgcgaagaagcgcaccgatgttgtctccagcttcagcatagtcaagaagcttacggaacatttcaacacctgtaacagttgttttgctgttttcttcttgaagaccgatgatttcaacttcgtcaccgactttaacttgtccgcgttctacacggccagtagcaactgtaccacgaccagtgattgagaatacgtcctcaactggcatcatgaatggtttgtcagtgtcgcgttctggagttgggatgtactcgtcaactgcagccataagttcaagaattttttcttcgtactcagcgtcaccttcaagagctttaagagcagaacctttaacaactggtacatcatcaccagggaagtcgtattcgctaagaagatcgcgaacttccatttcaacaagctcaagaagctcttcgtcgtctaccatgtcgcatttgttaaggaatactacgatgtatggtacaccaacgtttttagaaagaaggatgtgctcacgagtttgtggcattgggccatcagcagcagatactacaaggatagctccgtccatttgcgcagcaccagtgatcatgtttttaacatagtcagcgtgtcctgggcagtcaacgtgtgcatagtgacgagtgtcagtttcgtactcaacgtgtgcagtagagattgtgataccgcgctcacgttcttctggagcaccatcaatttgatcgtacgccatagctgtacctttaccagatttcttatgaagtactgttgagatagcagcagttaatgttgttttaccatggtcaacgtgtccaattgtaccgatattggcatgtgatttggaacggtcgaatttttctttagccattctaaaatcctccttaagagcttttaattagtaatgtatagagtgatagaaagtgaaagcaagctttcacttcctcatcttacaatagtagttatacttgagttaagtggcaaaatcaattattcgcctttattttttttgataatttcttcagcgatgctcttcggcacttcttcgtagtgatccatgaacattgtgaacgtaccgcgtccttgcgtgttagaacgaagggcagtagcgtaaccgaacatttcagcaagaggtaccatcgcacgcacaacttgagcgttaccgcgagcttccataccttctacgcgtccgcgacgagaagtaacatcccccatgatgtctcccatgtattcttcaggaataacaacttcaactttcatgattggttcaagaagaactgggttacatttgctgactgcatttttcaatgccatagaagcagcgactttaaacgccatttcgtttgagtcaacatcatggtaagatccatcaaaaagtttcgccttgatgtcgattagcgggaatccggctaggacaccattttcaagagagtcttcaagacctgcttgtacggctgggatgtattcacgaggaacaacacccccgacgattgcgttttcgaattcaaagccagcgccttcttcgttcggttcaaattcgatccaaacgtgaccgaactgaccgcgtccgcctgattgacgtacgaatttaccttcaacttttgcaccggtacggaatgtctcacggtacgcaacttgaggagcaccaacgttagcttcaactttgaactcacgcttcatacgatcaacaatgatatcaaggtgaagctcacccataccagagatgattgtttgacccgtttcagggtttgtttgtgtacggaatgtaggatcttcttcagcaagtttcgctaaagcgatacccattttatcttggtcagcttttgatttaggctcaatcgctacgtcgataacaggctctgggaattccattgattcaaggattacaagatccttctcatcacatagagtatctccagtagaagtatcttttagacctacagcagctgcgatgtctccagcgtaaacagtagagatctcttcacggctgttagcgtgcatttgaaggatacgtcctacgcgctcacgcttgccttttgtagagttctttacatatgaaccggaatcaagtgtaccggaatatacgcggaagaatgtcagcttaccgacataagggtcagtcataactttaaatgcaagtgcagagaacggctcttcatcagaagaatgacgaacgatctcttcatctgtgtcaggacgtacacctttgattgcagcaacatcagttggcgcaggaaggtagtcaagaacagcatcaagtacaagctgaacacctttgtttttgaaagcagatccaacaagtacagggtagaattcaacattcagtgtacctttacggatagcagctttcagttcagggatagtgatttcttcaccttcaaggtacttttccataagctcttcatcaagctcagctacagcttcaatcaggctgctgcgaagctcttcagcttgctctttgtactcttcagggatttctttcgcatctgaacgagttccaaggtcatcttcgtagaaatacgcaacgttttctactaagtcgatgataccttcgaagttgtcttcagcgccgatcggcaattgaattgcgtgagcgttagcttgaagacggtctcttaaagtgcctacagagtaaaggaagtctgcgccgattttgtccattttgttgacaaatacaacgcgcggcactccgtaagttgttgcttggcgccatactgtttctgtctgaggctcaacacctgattgagcatcaagtacggcaaccgcaccatcaagtacacggagtgaacgttcaacttcaactgtgaagtctacgtgtcccggtgtatcgatgatgtttacacggtaacctttccactgtgcagtcgttgctgcagaagtgattgtgataccgcgttcttgttcctgctccatccagtccatttgcgaagcaccttcgtgagtttcgccaattttgtggatacggcctgtgtagaacaagatccgttctgtagtagtcgttttaccggcatcgatgtgagccatgatcccgatattacgagttttttctaaggagaactctcttgccattgggtaatttctccttccttattagggaattattattttgattatatgaatcctaccagcggtagtgagcaaatgctttgttcgcttctgccatcttgtgagtgtcttcacgtttcttaacggcagcaccagtgttgttagctgcatcaagaatttcgttagccaggcgctcttccattgttttttctccgcgaagacgcgcatagttaaccaaccagcgaagaccaagagttgtacggcgttcaggacgaacttctacaggcacttggtagttagctccacctacacggcgtgcttttacttcaagtacaggcatgatgtttttcaatgcttgttcgaaaacctccattgcatcattgccagtgcgttctttaatgatatcgaatgacttgtataggattgtttgagatttaccttttttaccgtcgatcatcattttgttgatcaggcgggataccagcttagagttgtaaagcggatcaggtaaaacatctctttttgctacaggacctttacgtggcatctgaatatcctcccttcatagttttaatgatttatttgattactttgctttaggacgtttcgtaccgtatttagaacggccttgcgcacggttttcaactccggcagtatcaagcgcgccacgaacgatgtggtagcgtacccccggtaagtcttttacacgtccgccgcggatcagtacaacgctgtgctcttgcaggttgtgaccgataccaggaatgtaggcagtaacctcgattccgttagtcaaacgaacacgagcatatttacgaagtgctgagttcggttttttcggtgtcattgtacccacacgagtacataccccgcgtttttgtggagaagatacgttagtgtgctcttttttaaagctgttgtatcctttgtttagtgcaggtgacttagagttttcaactttgctcacgcgtcccttgcgaattagctgattaattgtaggcatgttgtgttcctcccttcattacgttttataacccacatacccaggtggttcatcattaggcaaaaaacaatgtctttacacaagattgatatcttatataaaaacaaaaagtacgctataacataatggcaacagctgctgctcccacttcaattccgcaggctttgccgagctttttcatggaatccaccatacagacagcggtattttggttctttgcaagctggataacgccagctgtaagaactgaatccgcgtcttttgccacgacgacttccttcactgaacctcgttttagagctttcactgtttgcttcgtaccaataataattgatttggcctgtgatactttatcataagacataaacatatcctccaaagtaacaggttttatttcgagcaccttggttatattatcactctgcgggacggatgtcaacaacgtatgacattttttagtgcagtccaccgccagaataattgtaatactgaggaaaagctgtcgaaacagcctttcctgcagcagtctctgttattcagccggaaccatatcttccgaaggctgaacgtttgaaacaggttttacttttctgtaattcatcataccggtaccggccggaaccagtttaccgatgataacattctctttcaggccgagaagttcatcgcgcttgcctttaatcgcagcatctgtaagaacgcgtgttgtttcttggaatgatgcggcagacaagaatgaatccgtctcgagtgaagcttttgtgataccgagaaggacaggacggcctgtagcaggtcgattgccttcaagcagcacttttttgttcgcttctgtgaattggtgaatatctagcaatgtgccagggagaacatcagtatctccggcatcgatcacacggactttgcgaagcatctggcgaaccattacttctacgtgtttatcgccgatttcaaccccctgcatacggtaaaccttctgaacctcatgcagaagatattcctgaaccgttgtcaggtcagtgactttaagaagttctttcggatcgatagaaccttctgtcagcacttgaccgcgggtaatctgatcaccctcagccactttcaggcgtgagttgtaaggtgccgtgtatgaacgtgtctcaacagcgccctgaacaacaatctcctgctgtttgtcgcggacttcattgatttcggcaattgtaccgtcaatctcagaaatcgtcgcttgacctttcggattacgcgcttcgaaaagctcttggatacgcggaagaccttgtgtgatatcgtctccggcaaccccgcctgtgtggaacgtacgcattgttaactgtgttccaggctcaccgatagattgagcggcgataatacctactgcttcgccgacttcaacatcagttccggttgcaaggttacgtccgtagcatcgtttacatacaccatgaggagtgttacatgtgaacgcagaacggatccacacttcttcgattccggcttcaacgatttccagcgctttatcttcatcgatcaattcattttcgttaatgagtacagcacccgtttcaggatgtttgatctgttttctggcgaaacgtccgatcagacgctcttccagacgctcgatgatttccgtgccttctttgagcggttttgcaagaataccgcggtctgttccgcaatctgtttcacgaatgataacatcctgcgcaacatcaacaagacggcgtgtaaggtaacctgagtcagctgttttcagggcggtatcggcaagacctttacgcgcaccgtgagtggagataaagtactccaatactgtcagaccttcacggaaactcgatttaatcggcaattcaatgattcgtccagccgggttggccatcagaccgcgcatacccgcaagctgtgtaaagttagatgcgttaccacgggctcctgagtcactcatcatgtagatcgggttgacttcgtctaatgatttcatcagtttgccttggataacatctttcgctgaactccaaattgaaatgactctttcataacgttcttcttcggtgattaaaccgcgtctgaactgtttcaggacattatcaactttgctttgtgcttcttcaaggatttcctgtttgtcatcgagaacgacgatatcagaaacccctactgtgatgccggctttcgttgaatatctgaaaccgaggtttttcatgcggtcaagcattttagacgtttccgtgatatggaatcgtttaaagatttccgcgatgattttaccgagaatgccttttttaaacggtgcgttgatcggctgctcagcaatcacagcttttacgtcagcacctttatctaagaagaaacggtcaggtgtcttctcttcaatgttgctcttcgttggttcattcatgtaagggaatgattccggaagaatttcattgaagacgagcttaccgacagttgtaattaacaattttgaacgctgttcttcagtaaatgtcacattcttaagggagttcgctgcaacagcaactctcgtatgaaggtgaacataaccgttttgataagcaagaagcgcttcgtccgtatttttgaaaaccataccctcgccgactgctccggcgcgctcaagcgtcaggtagtagtttcctaataccatatcctgagacggcgtaacaaccggtttaccatctttagggttcaagatgttttgggccgcaagcatcagaatgcgcgcctcagcttgagcctcagctgataaaggtacgtgaaccgccatttggtcaccgtcaaagtcagcgttataagctgtacatactaacgggtgaagacggatggcgcgtccttcaacaagcgtcggttcgaaagcctggatacctaatctgtgaagagtaggggcacggttcagtaagaccggatgctccttaatgacagattcaagtacatcccatacttcaggctgcacgcgttcgattttgcgttttgcgctcttgatattgtgagcaaggcctttttcaacaagctctttcatgacgaaaggcttgaagagctcaagcgccatttccttcggcaaaccgcactgatacattttcagatgcggacctacgacgataacggaacggcctgagtagtctacacgtttaccgagaaggttctgacggaaacgcccttgtttccctttcagcatgtgagaaagagatttaagcggacggttacccggtccggtaaccggacggccgcggcgtccgttgtcaatcagagcatcgactgcttcctgaagcatacgtttttcgttctgaacgatgatgcttggcgcgccgaggtctaacagacgttttaaacggttattacggttgatgacacgacggtaaaggtcgttcagatcagacgttgcgaaacgtccgccgtcaagctgaaccatcggtcttaattcaggcggaataaccggaagcacgtcgaggatcatccaagacggcttgtttcctgaattacggaaggcttcaagcacttcaaggcgtttgatcgcacgtgtacggcgctgtccttgagaagtcttcagctcttcttttaacatatcaacttctttgacaaggtcgatgtcctgcagaagtttattaatggcttccgcacccatagaggcttggaatttgtttccgtacttatccagatacgcacggtattccttttcagataaaagctgtttcttttcgagcggtgtattggccgggtcagttacgacgtaagaagcaaagtaaataacttcttccagcgcacgcggtgacatatccaatacaagacccatacggctcggaatacctttgaaataccaaatgtgagaaaccggggcagccagttcaatatgccccattctctcacgacggactttagcccgcgttacttcaactccgcaacggtcacaaactacgcctttataacgaacccgcttgtacttgccgcaatgacattcccagtccttagtcggtccgaaaatgcgttcgcagaacaggccgtccttttcaggtttcaacgtacgatagtttatcgtttcaggctttttcacttcaccaaaagaccatgaacggattttatccggtgaagcaagaccgatgttcatatactcaaaattgttcacatctagcaaggggcctacctccctttttatcttcggattaaccgatgtcacttgcctttatcaatcagagactattctttcgttactgcgtcacgttcaacgtctggagatgctgtttcttccggcgcttcatcacctgataatgcaaggccgtcagcttgtttcgcatcttcctcgtcttctagatctctcatttctatttcttcttcatcgcctgaaaggatttttacgtccatacctaagctttgaagctctttgatcaatactttgaatgattccggaacaccaggctctggaacattgtcgcctttgacgatggcttcatatgttttcacacgtccgaccacgtcatcggacttcacagtcaggatttcttgaagcgtgtaagctgcgccgtaagcttcaagcgcccaaacctccatctcaccgaaacgctgtccgccgaattgggctttaccgccgagaggctgctgcgtaacaagtgagtaaggacctgtagaacgggcatgaagtttatcatcaaccatgtgcgccagtttgatcatgtacatgattccgacagatacacggttgtcaaacggttctcccgtacggccgtcataaagaactgttttagcgtctcttgacatgcctgcttcttcaagtgtttcccacacatcttcttcacgcgcgccgtcaaatacaggtgacgcgatgtgaatgccgaggtagcgggcagccatacccatgtgaagttctaatacctgaccgatattcatacgtgatggtacacccagcgggttaagcatgatatcgatcggcgtgccgtcaggaaggtaaggcatatcttcttcaggaagaatcttcgagataacccctttgtttccgtgacgtccggccattttatcaccttcagaaatcttacgtttctgaacgatatatacgcgtacaagctggttcactcccggaggaagttcgtcgccgtcttcacggttgaagacttttacgtcgtggataattccgccgccgccgtgaggtacacggagagaagtatcacggacttcacgcgctttttctccaaagatcgcatgcagaaggcgttcttcagccgtaagctcagttacacctttaggcgttacttttcctacgagaaggtctccgtcgttgacttccgcaccgatacggataattccgcggtcatcaagattgcgaagcgcgtcttcccctacgtttggaatatcgcgggtgatctcttcaggcccaagctttgtatcacgtgcttctgattcatattcttcaatgtgaatagatgtgtatacatcatctttcacaaggcgttcactcataatgatggcatcctcatagttgtaaccatcccatgtcatgaagccgaccattacgttgcggccgagagcaagttcaccaagctccattgaaggtccgtcagcaaggatttctcctttgactacttcatcgccgacactgacgatcggacgctggttgtagcacgtaccttggttggagcggacaaatttcagcaagctgtacttatccaggttgccttttactttttggccgtcaatttcttcatagcggcgcacccatacgtttttcgcttccacccgttcaacgataccagggtgtttacaaataacggctgcaccggagtctttaccggatacgtattccatacccgttccgacgatcggagcttccggctgcatcaaaggcacagcctgacgctgcatgttcgctcccatgagggcacggttcgagtcatcgttttccaagaacggaatacatgctgtcgcagcagatacaacctgtttaggagatacgtccatgtaatccacgcggttgcgggctacaacggtgttttcccctctgaaacgcgctacgatgctgtcatccaagaaagaaccgtcatcgctcagcttagcattcgcttgggctacgacatagttatcctcttcatcagcagtcaggtagtcgattctaggcgttacttttcctgtttcaggatcaacgcggcggtatggcgtctcaatgaaaccaaagcggtttactttcgcaaatgatgacaatgagttgatcaaaccgatgttcgggccctcaggcgtttcaatcggacacatacggccatagtgagagtagtgaacgtcacgtacttccatacctgcgcgctcacgtgtcaaaccgcccggtccgagagctgacagacggcgtttgtgtgtcaattcagcaagcgggttcgtctgatccatgaattgagaaagctgtgagcttccgaagaactctttaatagacgcaataacaggtctgatgttaatcagctgctgcggcgtaattgtattcgtgtcttgaatagacattctttcacgtacgacacgttccatccggcttaaaccgatacggaattggttttgcaggagctcacctacagaacgcagacggcggtttccgagatggtcgatatcatcagtgtcgcccactccgtgcaggaggttgaagaagtagctgatagaagaaataatatcagcaggcgtaatgtttttaatcgcctcttcgatgtaagcattgccgatcacattgatcgtctgctctccttctgcatcggtaggagcatagattttaatggattgaagcatcacttcatcctcgacaacgccgccgttaggataaagttttctgaagccgattccattttctaagtatggcagtactttatcaagtgttcttctgtcaagaatctgccctttttcagcgagaatttcaccggtttccggatccaccagtgtttctgcaaggcgctggttaaacaggcggttcttgatatgaagctttttattaattttatagcgtcctacattcgcaaggtcgtatcgcttcggatcgaagaaacgggaatccagcaagctttttgcgttttctactgtaggcggctctccgggacgaaggcgctcatagatttcaagaagcgctttgtcactgttttcagtgttgtccttatccagtgtattgcggagatattcattctcaccaatgagatcgagaatctcttggtcggaaccgaagccgagagcacgcaaaagaaccgtaaccggcaacttacgtgtgcgatcaatgcggacatacacaacatctttcgcatcagtttcgtattctaaccatgcgccacggtttggaatgacagtcgcggtaaaaccttttttaccgttcttgtctactttaccactgaaatatacacttggagaccgaacaagctgagatacgataacacgttctgcaccgttgatgataaaagtaccggtatctgtcataatagggaaatcacccatgaagacatcctggtcttttacctctccagtttctttgttaattaaacgaaccttcactctcagcggagctgagtaagtcacatcacgttcttttgactcttcaacgggatacttaggatctcctaaactgtagtcaatgaactctagagagaggttaccagtgaaatcctcaattggtgatatgtcttgaaacatctctctaagaccctcatcaagaaaccactgataagaagaggtttgaatttcaatgagatttggtaattctaacacttcgctaatgcgagcatagcttctgcgctggcggtgtcgtccatactgaactagttgacctgtcaactgattcacccctcaaatcatgcgtattatatgtgtaataagcatctcttacgataaagaaatacttttacaagacaaaagaaaaaagggtttctaattaagaaaaccacatccaaaaacaaataccgattttattagcatttccatgtttgtataatttatacatgcactatgattatttcagcatatcatgcaaaatatatacattggcattttacaatattaacatagctgaaaaatcaagtcaaactttttttgcttttatgatataatagcctttctttttttgaatcacagaaacttcgtcaaaaagctccttcagtttttcaatggcagaaggcccgccctgttttttctgtataacgatccacaattcacctgaagcccttaaatgctcagcgcttttttcaaaaatggcatggacaactttttttccggcgcggattggggggtttgtaataatagaagcaaatgtttgagcagaatcaatatttgaaaataaatcactctgataaatccgaacgttttttattccgtttttttctgcattttcatttgacagctctacggctctttcattcacgtcaatcatgtgcacggtccggtccgtaaattcaccggcgagtgacagaccgatcgggccgtaaccgcagcctgcatccaggaagtcaccatcgatctccggctcttcaaacgcttcaattaagacacgcgaaccgaaatcaacttcctttttcgagaaaacgccgctgtcacttgtgaatgtataagatctgttccgcagtgtaaatgaccatgtctgtttatcgcttttaactgaaggtttttctgaataatagtgatcactcattattagaacctccttttataatggcacttaaagaaaagcaaagaaaaagcccgcctcataaaagcgagcttcccctacaggcaagtgaagattacttaacttctacagaagcgccaacttcttcaagtttagctttaagctcttcagcttcttctttcgcaataccttctttaagtggttttggagtgttgtcaacaagttctttagcttctttcaagccaagaccagtgatttcacgaacaactttgataactttgattttctgagaacctgcaccagcaaggataaggtcgaattcgctttgctcttcagcagcgccgccagcagcagctccgccagctacagctacaggagcagcagcagttacgccaaattcttcttcgattgcttttactaggtcgttcaattcaagtacagttgcttctttaacggaagcaatgatttcttcgatatttaaagccatttgaaattcctccatttgttttattttagggtaaaatcagattaagcgccttgttcttccttttggtctgcaactgctttagctgcaagtgcaaggttgcgaactggagcttgaagtacgctaagcaacatagaaagtaagccatcgcgtgaaggaagttcagcaagagctttcacttcttcaacagaagatacttttccttcgataacgcccgctttgatttccagagcttcgtgatttttcgcgaactcgttaagaacttttgccggagcgataacatcttcagtactgaatgcgatcgcattcggtccagttaagacatcattcaaaccatcaagttcagcttgttcaaccgcacggcgagtcattgtgtttttgtacactttgaactctacgttagcttcgcgaagctgtttacggagttcagttacttcagaaacgttaagtccgcggtagtcaacgatgatcgttgatttgctttctttcagtttagaagcaatctcttcaacaacaactttttttgtatcaattgcgctgctcatggttacacctcctgtagattttgtgtaacacttataccgctaggtgatcacgactgtgacgacgatttcatataaaaagcctccatgtggacatggaggctgtatatacaagcatacgtaacgtaatagctgtgatatatatacacctcggcaggatattaagccttaacggcccctgctgtctacggtataaatgacatattatattttacaacattttgaatcatatcagaatgctgatctaaagtcaaatattattttacgttgaaagtagaagcgtctactttgacaccagggcccatagtagaagtaacggcaacgtttttcacgtaaacacctttagccgcagccggttttgctttcaggattgtatcatacattgttgtgaagttctcaacaagtttttcatcctcgaaagaaacttttccgatcggaacatggatgttaccagctttgtcaacgcggtattctactttaccagctttgatttcgccgattgctttttccacttcgaatgtaacagttcctgttttagggtttggcataagaccttttggtccaagcacacgaccgattttaccgacttcacccatcatgtcaggagtcgcaacgattacatcgaattcgaaccagccttgctggattttcgcgatgtaatcagaatcgccaacgtagtctgcaccggcagcttcagcttcttttgctttttcgcctttagcgaatacaagcacgcgctgagttttaccagttccgttaggaagtacaactgcaccgcggatttgctgatcgtttttacgagggtcaacccctaaacgaaaagcaacttcaactgtagcgtcgaatttagctgtgtttgtttttttagtaagcgccactgcttcagcgacatcataagctttcgcacggtctacaagcttcgcagcttcaacgtactttttaccttttttagccattttaaaatttcctccttatgtggttatagcggaataacctcccacgaataagggttgcgaacttgtgaaaactcgcaacccgacaagaaacaaattaatcctcgataacgatacccatactgcgggcagtaccttcaaccatgcgcattgccgcttcaacgtctgctgcgtttaagtcaggcattttcgtttcagcgatttcgcgaaccttatcgcgcttaacggttgccactttattacggtttggttcaccagaaccagactcaattccagctgcttttttaagcaatactgcagcaggcggagtttttgtaataaatgtaaatgaacggtcttcgtaaaccgaaatttcaacaggaatgattaaaccagcttggtcagctgtacgagcgttaaactccttacagaatcccatgatatttacaccggcttgacctagtgcaggtccaactggcggcgctgggttagcttttccagcaggaatttgcaattttacaacttttactacttttttagccacgagacacacctccttaagtccgtgatgtggtaatagggtaaaccctcccactcaaggtttcattctttatatgaatgacgaaatatcaagctagctgccttggattagtccaagacgtacctttgctatattatcattaatatatagcaatttcaagttttttcacattacaatttgtcgatctgggtaaattccagttcaaccggcgtttcacggccgaacatgttaacgaatactttcactttgctcttatcataatcaatctcttcaattgatcctgtaaagttggcgaaaggtccgtctatgactttgactgtctcattcaattcaaaatcaatgtcggttttccgctcatccatgcccatgcgttttaagatggtttccgcttcgccaggaagaagcggagtcggctttgagcctgaaccggctgatccgacgaatccggtaacgcccggcgtgttgcggaccacataccaggaatcatcagtcatgacgatttcaacaagcacataacccgggaacactttctttttgactacttttttcttgccgttcttaatatcagtctcttcttcttcagggacgacaacgcggaaaattttatcctgcattcccattgattccacacgtttttcaaggtttgcttttactttgttttcataaccggaatacgtatgaacaacataccaattcttttccattctatcaggactctgcagtccttccctccccgcatttaaaaatgaagtgtaaaacaaaaaataggctcagggcctatgaatccttttttcaacaacacaataaaaaacccgctgaacgggttttggcaaacgatattatgatctattatagcacgtattgctgatcattattcaactattaaacgaattaattgagaaattcctgtatcaaggagggcaaaaaagataacaaaaaagataaccgttgaaatcaccgtgatcgtatagcgcgttaactctttgcctttaggccagctaacctttttcatttctttcccaacatctttaaagaaactcatcatgcgcatgtaaaagacctccacaatttaaaaagcgaacactattttgtttctaaatgagctgtatgtgaattgcaagtgctgcagtacttcttaacttctaaccgctcagccgctgatgcagagcttttcattgtcgtataattacgatttccgcatgttttgcatgccagcgtaatcttttttctcatgtcgttacaccttttcctaaacattcatttatcttaataaaatagcacagtcagaaaaattctgtcaatatgacacagaaacctgctacaggctgatctctcttatttctaaatacttttcaagcttgcgcttcacgcgctgcagggcattatcgattgattttacgtgtcggtttaagtcatctgaaatctcttggtaacttcttccgtccaagtacaaaacaagcacctttctctccagatcgctcagcagttctcccattttcatttcgatatcatcaaattcttcctgattaataatcatctcttcaggatttaacgttttagcgcctgaaatgacatcaagcagtgttctgtcagattcttcatcaaaaataggtttgtctaaagaaacataggaatttaaaggaatgtgtttctgacgggtagctgtctttattgcggtaataatctggcgggtaatgcataattctgcaaaagctttaaatgaagtaagcttgtcctctctaaagtctcggatagacttatataagcctatcatcccttcctgtacaatatcttctctgtcggcccctattaaaaaataagaccttgctttcgcccgtacaaaattacggtacttcgtaatcaagtaatctaacgcatcactatccccaacatgaaccttttcaatgacctgctcgtcctccaactggcaaaattgcactttgttgaactttcccttgctgttctgtagattcactgcgatccccccggcgcacgtagatagaaatattatacattaatgggcgaaaaagcgtcaacctaatccagaccgcctcggcgccacttttcaaacgttttcaaaacctcttcggacagctcgattttacccggtggtttttcagaagtgatctttgaaacccgcctttgaatccggcgttctatcgtatccacttccctcaggagctcccgggcggatttacggagagccccttgtccgaaaatcgcccactgctccgtataatcggaggttgcgacatgaatctgtgtcgcaatattattcagcgcctgggcaagcttctcgatccgctcatccgccgtttcattctcccgtgtgaaaatcacttcgactctgtgattcgtttgttttttctctatgccttttaccaggtgtgcgtcaaacaccacaatgactctgattcccgtgtaggactgatattccgccatcttctggatcagtacatctctcgcttcttcaaaactgttcgcttttaaatcctttagctgcggccaagctccaatcatgttgtatccgtctactaacaggatgtccatctgtcttcattcccctaaaggattgcgcttccggtagacttcatacatgagaaggccggccgctaccgacgcattcagagaagtgacttttccggccatcggaagcttaatgagaaaatcacatttctctttcacaagccggcccattcctctgccttcgcttccgataacgagcgccaaaggcatcttgccgtccatagagcggtagtcttcccgggcggatgcatccgttccgacgacccaaatcccccgccccttcatttcatcaagtgtccgggcaaggttggtcaccttcacgacgggaatatgttcaatcgcaccggtcgaagcttttgcgaccgtcgaagtcagtccgactgctctgcgtttcggaatcacgatgccgtgtgcaccgacagcgtcagccgttctcatgatggaaccgagattatgagggtcttccagctcgtccagtatgagaaagaaaggctgttcgtttctctcttccgctcttttatataattcgtctaattgtgcatattcatatgccgccacctgggcgacaacaccctgatgctgcccctccaccatctgatcgagttttttcctcggtacaaattgaatggtgacgccgcgctttttagcaagctccataacttgctgcgcctgtccttttactgtgttttccgccatccataacttatacagcttgcgatctgactttaacgtctcaatcaccgcgttttttcctatgacgtaatcatgttgctgactcatttgttttcctccctgacgtcccgacttgtatagcctcagcaatcagctgattcagtctttcttctcttttctcaagaaaaaggtaaccgagtaaagcctcaaaagctgtactatggcggtacgtctgtacatctgtgtttttaggcgtcgtccctgatttcgcgtttctgcctcttctcagcacggcttcctcttcctccgtgaaaaaggattcgtcctgaaggcggaacaatatgtctgcctgtgattttgccgatacaatccggctcgccttcttatgaaggtcattcggtttcgtaaagccctgcttaagcaggtgatgccggacgtatatttcaaaaatggcatcacccatataagcaagcgcaagaccgtttaactgctttgaatctttgatttgttcaaattgaagcatccgcttactctccccgcttccagcgagttccctgggccgtatcttcaagaatgatattcatgcttttcagctgatcgcgaatctggtctgacaaagcaaaatcgcgattgcggcgggcttcatttctcttctcaatcaactcttcaatctgttcgtcgacaagctcttcttcgccgagcgtaagtccgagaacagatccgattctgtcaaacatgctgataaaggctttaatgacgtgatccgccgtattgtcttcctgcatgtagtaattggcgagcttcgccagatcaaaccaaacggaaattgcattcgccgtattaaaatcatcatccattgcttcttcaaacgcagtgcggtgctcttcgattttagcgagccattcctcatcattgtcagtcagattcgtgctgctaatcaaacgatggtttaaattactgtaggccgtcttcaggcggttaaacgcgttttttgttttctcaagcagctcttccgaatagttgatcgggtggcggtaatgaacggacagcatgaaaaatctcaaaagctgcgggtcatgttgcttaatgatatcgtgcaccaaaacaaagttgccgagcgattttgacattttctcattatcgatattgatatatccgttgtgaagccagtattttgcgaatgtcttgcctgttaatgcttcagattgggcgatttcgttttcatggtgcgggaatgtcaggtcctgaccgccggcatgaatatcgatttcgtcacccaaatactttttcaccattgcggagcattcaatatgccagcccgggcggccttttccccaagggctatcccatgaaatttctccgtccttagcagctttccaaagagcaaagtccagcgcatcctctttcttctcgccgacacggatacgcgcgcctgatctgagttcatcaattgattgctgagatagcttgccgtacccttcgaaggcccttgttttgaaatagacgtcgccttctgattcataagcgtagccttttttaatcagttcgctgacaaattcaataatggcacccatgttttccatgacccgggggtgaagatccgctttccggcatccgagggcgcccacatcttcaaaatacgctttaatgaaccgttcagaaacggtcgggacgtcctcgccgagctcgttggccgccttaatcagtttgtcgtcaacatcggtgaaattcgatacgtattgaacatcgtatcctttatactctaaatagttgcgtacggtatcatacacaatcgccggacgggcgttgccgatatgaatatagttgtatacagtcggtccgcacacgtacatttttactttgccttcctcaagaggaacgaatgtttcttttttccgtgtcaatgtattataaagtgtaatggtcatttttggttgatcctttcttttttatcttccagttcagcctgcagttcaaaaatctgctgctccaatgctcttaacctgtcagcaaccggatcgggcaagtcttggtgattgagatcgcgtttgatttttcttccgttctgaatgacgacttttccaggtatgccgacaacggttgaaaagtcgggaacatcacgaagcacaacggaaccggcccctactttagaaccctgcccgaccgtaatagagccgagcaccttcgctccggttgcaattaaagcatcatcttttatggtcggatgccgcttccccttttcttttcccgttcccccgagagtgacaccttggaataccgtcacgttattgccgatttcacatgtttcccctatgacgacccccataccgtggtcaatgaaaaaccttctcccgatggtcgcgccgggatggatttcaattccggtaaagaaacgggcaatctgtgatatcaggcgcgccaggaagaaaaatctccgtttatataaagcatgtgcaatccgatgcgcccatatagcatgtaaaccagaataagttaaaacaacttcgaaatagcttcttgctgccggatcttgatcgaacactgtatctatgtcttcttttagcattttaaaaaacacatgcttccccccattctctccccgctccagtctgtttttccgcctataaaaaaagcgcctctgcatgtaaacatgacagagacgcttttaccgcgcggttccactctgtttgaaaaacaagtcactgttttcccaacttaaaagccggtaacggcggcggccgcctttaaatactgatttccgcagaaatgttcttcaaaggtcttaagggcgcacttctaaaacatgacgcatgaatctctctcagccgatgaagattctttctgtaatggtcattgttttatactcttccctgtcaacaatcgtatatttaaatgcttttcaggcgtctgacggctgtttctctgccgatcagctcaatggcctgcggaagctcaggaccgtgtgtctgaccggtaaccgctacgcgaatcggcatgaacagctttttgcctttatgacctgtttctttctgaacagctttgattgaggctttgatcagctcaggcgtaaattcttcaagctcttcaagcttcgcagcaaatacgctgagcacttcaggcacctgttcctcttccagaacggcttttgcctcttgattatactcgatctcatctttaaagaacaaatcagtcagctcgacaatttcagcgccgtagctcaattgctcatggtaaagagaaattaatttacgaacccattcctgctcctcggcagaaagctcagtgccgacttttcctgctttttgcaggtgcggcagggtcagctcaaccacttgatcaagatccagcgctttgacgtattggttgttgacccatttcagtttatgcatatcaaacagagccggtgacttagacaaacgatttacatcaaaaatttcaatgaattgttctcttgtgaaaagctcttcttcaccgacgggagaccagccgagaagtccgataaagttaaacagcgcttcaggcaggtaacccagctcatcatactgctcaataaactggataattgattcatcacgtttacttaattttttgcggctttcgtttacgataagcgtcatatgtccgaagacaggaacatcccagccgaatgcctggaaaatcatgatctgtttcggtgtatttgaaatgtgatcctcaccgcggagcacgtgcgtcattttcattaagtaatcgtcaatcgcgacggcaaagttatacgtcggtgttccgtcttttttgacgatgacaaagtcgccgatgccgtctgattcaaaagaaatctcgccttttacgatatcgttaaatgcgatgattttcccttccggcacgcggaaacggatgctcggctgtctgccttcggctaaaaactgctcctgctcttcctgagtcaggtttctgtgtttgccggaatagcgcggcatttccccgcgggcgatttgctcttcacgttctttctcaagttcttcttccgtacagaaacatttataagcaagccctttttcaagaagctcttcatagtactttttgtaaatgtcgttacgctcagactggcggtacgggccgtattctccgccgatatccacactttcatcccagtccatgccgagccatttcaaatagttgagctggctttgctctccgccttcaatatttcgctttttgtccgtatcctcaatccggataataaactttccgccttggctgcgggcaaataaatagttaaaaagcgccgttctggcgttaccgatatgcaaatgtccggtcggactcggtgcataacgaacgcgtacttcatttcccatgttcaaatacttcctttcatctcgtctgtagcctctagccgaatatatgtatctattctaccaccaaatagaccgggcatcaaaacaatgatcaggctttttggatcagaacggtcgcctgagcggcaattccttcggctcttccggtaaacccgagcttttctgttgtcgtcgcttttacgtttacttgagagacgtccgcctcaaggccttccgctatccgttttctcatagcatcaatatgcggcgccattttcggcttttgcgcaataatcgtgcagtctatatttccgagtacgtaccctttttcttttacaatgttccagacatgctgaagcagcttaaaagagtccgcatccttgaattccggatcagtatccgggaaatgcttgccgatatctccttcacctgccgctccgagacacgcgtctgcgactgtatgcagcaatacatcagcatctgaatgtccgagcagccccttttcataaggaatttcaattccgccgatgatgagaggacggccttccgttaattgatgcacatcaaatccttgtccgattctaaacattatgattcccactttccgctttcatgattgcttccgcaaatatcaggtcatccggcgttgtcagcttaatattggtatagctgccttcaacgatactcacctgatatccatcaagacgctcgacgaggctggcgtcatccgtccctaagaagcctttgttttccgcttccatatgcgccgtcttcaataaagaaagacgaaaagcctgcggcgtttgaacggcccacaagcttgaacgatcaaaggtctccgcaacccgggagccttccgcccgttttatcgtgtctttcacaggaacagccaggacagccgctcccgcctcctctgctgtttcaacgagcttatcgatatgctgatgtgtgacaaacgggcgcgctccgtcatgaacaaggacgaccgagtccttatcaatcactttcagtccttcgtatacactgtgctgacgctccgcacctccggtaacaagctcaatttccgtctgaatcggaaattgggccagcagctggcgaaaatcttcccgttcactctcgtttatcaccaggattattttctgacagggtgcgtggctttcaaaaacccgcagtgtgtgtataataacaggcgcaccttttaagctgatgaacagcttatttttcccggccttcatccgttttccttgtccggcagccggaataacgacaacatattccatataaactccctcttaaagagctttctcaagcagcttgggcttggcaaaaatcattcgtcccgccgctgtctgcagtacgctggttacgagcacatcaatatgtttccctatataattgcggccttcttccacaacaatcatcgtcccgtcatccaagtaagccacaccttgattatgctctttcccgtccttaatcacctgcacattcatctcttcgcccggaagcacaaccggcttcaccgcgtttgcaaggtcattaatattcagtaccgcaaccttctgaagctcgcatactttatttaaattaaaatcattcgtcacaacgacgccggatgtcagcttcgcaagtttgacaagcttgctgtcaacctcctgaatgtcctcgaagtcgccttcataaatttcaaccgtaatatccagttccttttgaatgcgattcaagatatccagtccgcggcgtcctctgttacgttttaaaacatctgaagaatcagcgatatgctgtaattcctccagcacaaattgaggaatgacaatgacgccttctaaaaagcccgtctgacaaatatctgcaattctcccatcaataataacacttgtatccaagattttcagccttttatcctgttcctcctgctcctcatcagcacttccctttttcttctgcattcttgcagaaatggagaaaagactgatcagttcatcctttttcttaaatccgacttggaagcccaggtaaccgagaaagaaagccagaaagaccggaatgatcgtgctgaatatacggtacggaatattgtccagcggaatcacgtttacaatgagatatgcgatgataagtccaaaaaccaatccgagactcccgaataacagatccggcaccggagctctcagcaaagaatcttcaatccattttacccaattaatcacatattctgtcgtccatatactgatgagaaaaaagataatagcaccaattgcagcagacgtatatgcgtttgttattaaaggtatgtcctgtatatttgacagcacaaacaattcaggtattaaaaagataccgacaacgccgcccacaataatgaagaacgcctgaactattcgttttaacatacctccacctccttttaagtagcattttttcagcagactgggtcagagcctacaaattcagaataaacaaaaactaacaataatatacccggattccgacaggtttaagcgattcttaaagctgtctatctatatagtgtttttcctgaaggcgttttaagccttttttgatttttttggcgcgcacttcgccgataccctcaacatcatcaagctcttctacagtggcttccgttatgcttggcaaaaatccgaacgcctcaaccacattttcaacaatcggcatcggcagacgcggaattttgttcagcagcctgtatcctctcgggagcacataatcatcaagattggtagaagccggatatccaagcagcttaaacagaatggaatcatcaagcagatcatagctggacatatcctgaagctcttttaacagcacgaacggatctttgattttttctttgacatagtctttgatgaaaagtgccgcctcttcttccatgtccgtaatcagttcaatcacctgcagacggattaagtggccttccgttccgagttctttaatatacatattgatttcattttttattcggagcaccatttcatatcgatgcatgacggacagcacgtcactgaatgtcacaagctcctcaaactctaatgcgtttaaagccgtaatcgttttgtctaaaatggttttatacttctcaagcgtttgaatggcctgatttgcctttgttaaaataaatcctatgtcctttagtgtgtacttcatgctgtcctgatataacgtaatgacatttctgcgctctgaaatggcgatgacgagacagccggtctgcttcgccacccgttccgccgtacggtgcctcattcccgtttctgaagaagaaatggtcgcttccggcataagctgcgtattcgcataaagaattttctggccggaatcacttaaaataatggcaccgtccattttggccagctcgtataagtgagcgggcgcaaatgatgtattaatatgaaaaccgccatccacgacttgctttaccttatcattgtatccgacaacaatcaggccgcctgtatttgcccgaagtacattctctatcccggctctgagcggggtgcccggtgcaacgaactgcagaattgcagacaggtcaagctcttgtttcgccccttttttctctttttccatctattatgatcctcctaatgaagtacgaagcgcttctgcaacatttgctactccgacaacctcaatcccttttggtattgtccatccgtctgcattcgcctcaggtataatcatgcgcttgaagccgagttttgccgcttcctttacgcgctgttcgattcttgacaccctgcggacttctcctgtcagacccacttcaccgataaagcaatctgcgggattcggcggtgtatctctgaagcttgaggcaatgctgacggctactgccaaatcaatcgccggttcatccagtttgaccccgccggcgacctttaaatacgcatcttgattttgaagcaaaagacccacccgcttctcaagcacagccataattaacgataccctgttgtggtcaatgcctgtagccatgcggcgcgggtttccaaaactggtcggtgaaatgagcgcctggatttcaaccagaatcggtctcgttccttccattgacgcaacgatactcgaacccgatgccccggcagaacgctcttccaagaaaatttcagaagggttcagcacttccgtaagcccctcttcccgcatttcaaagatgcccatttcatttgtggagccgaaacggttttttacggcccgcaaaatacggaatgtatggtgccgctctccttcaaagtatagaacggtatcgaccatgtgctcaagcaatctcggccccgcgatcgatccttcttttgtgacgtgcccgacgataaaaataggtatgccgtttgttttcgcaattttcatcaattcggccgtacactctcttacttgtgatacactgccgggagctgaggtgatatcactttggtaaacggtctgaatggagtctacgacaacaaatgcgggtttcatctcttgtatagcagacgaaatatactccatatcggtttcagataaaacatgtaacatttggctgttgattccaagtctgtcggcgcgcagcttcgtttgcttcacggattcttcccctgaaatgtaaagcacgctgccggccgtatcagctaattgtgcggatacttggagaaggagcgttgattttccgatcccgggatcgccgccgattaatactaacgagcctttcacaacgccgccgccaagcactctgttgaattcttcgagctttgtttgaacgcggggttcttccgatgtttcaattgatgtaatgggtgatggtttttggacggtttgaacggagtgggagaaagccgcccgccgattcgccggcgctttttttatggtttcttccaccattgtattccaagccccgcagcccgggcactttcccatccattttgcggattcataaccgcatgagtggcagatgaattttgtttttgatttagccatatatgttgtaagacctcttccttatcgaatatttctctatataacaaagtgaggcatacacttgcttacgtatgcctcatgtttgtcactatattagttcgttttagcagttgtttttacgacaaattcgccgtcctcaacatcaagaacaatgtgctggcctttatcaatattgcctctgaggagttcttctgataaccggtcctccacatgcttttgaatcgctcttcttaacggacgtgcgccgtattccaaatcgacgccctcttctgccacttttgcttttgcagcatccgtcagctcgatagagagatcttgttctttcagacgttttgttaactgatcagacataagcgacacgatgtctgtaagatgttttttctcaagggagtggaagacgataatttcgtcaatccggttgataaactcaggtctgaaggcacgcttcagctctcccattactttgtctttcatgtctttatggttttgtgattcatcctgcacattgaagcccacatatttgttgcgtttcagctcgctcgctccgacgtttgacgtcataatcaggatcgtgttgcggaaatccacagtgcgtccttttgaatcagtcaagcgtccgtcttcaagcacttgcaggagtatgttaaacacatcagggtgcgctttttcaatttcatcaagcagtacgacagagtaaggttttcttctcactttttctgtcagctggccgccttcatcatagccgacatatcccggaggagaaccgacaagacgtgaagttgagtgtttctccatgtattcggacatatccactctgatcatcgcttcctcatcaccgaaaatggattccgccagcgctcttgccagctctgtcttcccaacgcctgtagggcctaggaagatgaatgaaccaatcgggcgtttcgggtccttcagaccggctcttgcacgtctgacggcctttgcaacggctacaacagcttcatcctggccgatgacgcgggagtgcagaatgctttccatattgagaagcttatctgtttccgtttgggcaattttagatacaggcaccccggtccagctggatacaaccatcgcgatatcctctacagaaacttcggagttctcctggccttgtttttctttccaggtttttttcgtgtcttccacctgttctctcaggcgctgctccgtatcacgaagggaagccgctttttcaaactcctggctctgaacggcagcgtctttttccttgcgaacttcatcgagtttctgctcaagctcttttaagttcggaggcgttgtgaacgaacggagacgcacttttgaaccggcttcatcaattaaatcgatcgctttatccggaaggaagcggtcagaaatataacggtcggacaattttaccgccgcttcaatcgcttcatcggtaatggatacgcggtgatgcgcttcatagcggtcacgaagcccttttaaaatttgaatgctttcatcggctgagggctgatccacctgaatcggctggaaacggcgctcgagagcggcgtctttttcgatatatttacggtattcatcaagcgttgtcgcaccgatgcattgaagctctccgcgggccagtgaaggttttaagatattcgacgcgtcaatcgcaccttctgctccccccgctccgatcagtgtatgcagttcgtcaatgaataaaataatattgccggcctgacgtatttcatccattacttttttcaagcggtcttcaaattctccgcggtatttcgtaccggctacaaccgtacccatgtctaatgtcattacgcgtttatcacgtaaaatttccggcacttcattattgatgatctgctgtgcgaggccttcagcaatcgcagttttacctacacccggttctccgataagaacggggttattcttcgttctgcggcttaatacctcaataacacgctgaatttctttgcttcggccgataaccggatcaagactgtcttccttcgcaatcgcagttaaatcacgcgccagactgtccagcgtcggcgtgtttgcattgctgttcgtaccggatgcagaagatcccgtctcattgcttcccagaagctgcaacacttgctgtctcgccttattcaagctgacaccgagattattcagaactctcgccgctacgccttctccttcacgaatcagtccgagaagtatgtgttctgttcccacataagaatgtcctagctttctggcttcatccatgctgagctcaatgactttttttgctcttggcgtataatgaatcgtttgagacatttcctgtccccgtccgattaagctctccacttctttctgaattttatccgaaccgagtccgagtgcttggagtgctttagccgcaatcccttctccttcacgaaccagacctaataagatatgttcagttccaatattgttatggcctaagcgcagtgcttcttcctgtgccagtgccaataccttttgagctcgctctgtaaaccttccaaacatcatatcgaatcatcctcctgtctatttgcactcatttctaaatgcagcctttccctgataagagccgctcttctcgcgtctctttcgttcggccgtaatgcaccgcccgaatattgctggagaaaacccggctgtgtcaaaatcatcagttcattaagtatattgcttgatagccctttaatgatccccaggtctatccccagccgaacgtcagaaaggcatttcgccgtttcctttgattcaatcatacggcagttggataaaacaccgtaagacctgaatacccggtcctccaattcaattttcgaggtttggtaaagcgcttctcgggctgaacgttcctgctcaatcagctgggcagccacactgtttaaatcatctacaatgtcctgttctgattttccgagtgtgatttgatttgaaatttgaaagatatttcctaatgcttcgctgccttcaccgtaaattcctctaacaactaaacctaattggttaattgccggtataattcgattcatttgcctagttaatacaaggcccggcaaatgcatcatgactgaagcccttagtcccgtccctacatttgtaggacagcttgttaagtaccctctcttctctccaaaggcgtaatccactttctcctcaatccagtcatcaacctggtttgccgcttttatggcattgagaagctggaagccggggaagaggcattgaattctgatatgatcttcttcatttaacataatgctgacttcttcattttcagaaagcagacagccgccaaaaggggattccgttaaattcgggctgatcagatgtttctccatcagcacccgtttttccaaaggctgagcttcactcattctgattaaatgaaattgaccgatatcaggcagttcttttcctgaaaagtgatcttcgaattgctgaatgatggatgaggcttcttcattcgtataccgggcgggaaactttatattttcaaagtttcgggccaaccgtatacggctgctgagtacaatgtcactttcaggtcccttttgcttcatccaattgcttagtgcgtcctgaataaaatgcttgagcgacattacccttgttccccctcactgtctttactttttaacttctgctctaacgatcggatctgatccctgacctccgctgctctttcaaactcttcgtggtgtattaaagattcaagttctttttttaacatttccatttgccgtcttacatgcaggtttccgcctattcgttttggaattttcccggcatgcaccgtattcccgctgtgaacttttcgcaagatcggcgtaatttggctgtagaacgtatcgtaacattccgcacagccgaaacgccctgtttttctcagctgctgaaacgtcataccgcatttcttacaagctgtcccttgctctgaatagccgaacatttgagaaccggtgttttgaaatgaagactccatattcagcagccctgataataaattatggatcgagaacccttggtttccacttatactgtatgaatcgctattttcttttgcacattgttcacaaatatgaacttcttgtttttctccattaacaactttcgtaaagtgaaaagtggccggtctctcattgcattcttgacaaatcaatcttttcacccgcttactttagttttaaagatgtgagcattgctttcatcattctggctcttagttcatcccgttcgggcaaatcaatatatagaactgaacgatccattacactcaccatcattttagcttctctttccgatataactccgtcctctaacagtctgagaataatgtcatcagaggctgcctgggacaagtgggtatgaatctgcgaaataatattattgatgaggacgacttcgttattcattttaattttgataatacgaatatacccgccgcctccccgtttactttcaacaatatatcctctttcacttgtaaatctggtgttgatgacataatttatttgggaaggaacacattgaaatttatcagcgatttcactgcgtttgatctctaaaatttctttgccattttgatctaatacttgtttcaagtactgttcaatgatgtcagaaatattatgtcccactcaaccccctccttcattgactttgactatatttgactttaaccttactataaggtgtttcgcaaaatttttcaactgtatcgctctatctctattatttccactttgcacaagcataaaacctgcttttgcaaaaaggcatatcgttacgtttctcatattatataatgtatgcagaaaaacacaaaaaaggcagctcataatgagctgcctttaccgtaatgatagcttggcggcgtcctactctcacagggggaaacccccgactaccatcggcgctgaagagcttaacttccgtgttcggcatgggaacgggtgtgacctcttcgctatcgccaccaaaccattgagagtgttctctcaaaactagataacagtaagcatacattcaaattggttaagtcctcgatcgattagtatctgtcagctccatgtgtcgccacacttccacctcagacctatcaacctgatcatctttcagggatcttacttccttgcggaatgggaaatctcatcttgaggggggcttcatgcttagatgctttcagcacttatcccgtccgcacatagctacccagcgatgcccttggcagaacaactggtacaccagcggtgcgtccatcccggtcctctcgtactaaggacagctcctctcaaatttcctgcgcccgcgacggatagggaccgaactgtctcacgacgttctgaacccagctcgcgtaccgctttaatgggcgaacagcccaacccttgggaccgactacagccccaggatgcgatgagccgacatcgaggtgccaaacctccccgtcgatgtggactcttgggggagataagcctgttatccccggggtagcttttatccgttgagcgatggcccttccatgcggaaccaccggatcactaagcccgactttcgtccctgctcgacttgtaggtctcgcagtcaagctcccttgtgcctttacactctgcgaatgatttccaaccattctgagggaacctttgggcgcctccgttaccttttaggaggcgaccgccccagtcaaactgcccacctgacactgtctccccgcccgataagggcggcgggttagaaggtcaatacagccagggtagtatcccaccgatgcctccaccgaagctggcgctccggtttccaaggctcctacctatcctgtacaagctgtaccaacattcaatatcaggctgcagtaaagctccacggggtctttccgtcctgtcgcgggtaacctgcatcttcacaggtactataatttcaccgagtctctcgttgagacagtgcccagatcgttgcgcctttcgtgcgggtcggaacttacccgacaaggaatttcgctaccttaggaccgttatagttacggccgccgtttactggggcttcaattcgcaccttcgcttacgctaagcgctcctcttaaccttccagcaccgggcaggcgtcagcccctatacttcgccttacggcttcgcagagacctgtgtttttgctaaacagtcgcctgggcctattcactgcggctctctcgggcttgcaccctaacagagcaccccttctcccgaagttacggggtcattttgccgagttccttaacgagagttctctcgatcaccttaggattctctcctcgcctacctgtgtcggtttgcggtacgggcacctctcacctcgctagaggcttttcttggcagtgtggaatcaggaacttcgctactataattcgctcgccatcacagctcagccttcacgggaaacggatttgcctatttcccagcctaactgcttggacgcggatatccaataccgcgcttaccctatcctcctgcgtccccccattgctcaaatggtgaggaggtggtacaggaatatcaacctgttgtccatcgcctacgcctttcggcctcggcttaggtcccgactaaccctgagcggacgagccttcctcaggaaaccttaggcattcggtggaggggattctcacccctctttcgctactcataccggcattctcacttctaagcgctccacaagtccttccggtcttgcttcacagcccttagaacgctctcctaccactgttcgaagaacagtccgcagcttcggtgatacgtttagccccggtacattttcggcgcagagtcactcgaccagtgagctattacgcactctttaaatggtggctgcttctaagccaacatcctggttgtctaagcaactccacatccttttccacttaacgtatactttgggaccttagctggcggtctgggctgtttccctttcgactacggatcttatcactcgcagtctgactcccaaggataagtcatcggcattcggagtttgactgaattcggtaacccggtaggggcccctagtccaatcagtgctctacctccgagactcttaccttgaggctagccctaaagctatttcggagagaaccagctatctccaggttcgattggcatttcacccctacccacacctcatccccgcacttttcaacgtgcgtgggttcgggcctccattcagtgttacctgaacttcaccctggacatgggtagatcacctggtttcgggtctacgaccacgtactcaattcgccctattcagactcgctttcgctgcggctccgcatcttctgcttaaccttgcacgggatcgtaactcgccggttcattctacaaaaggcacgccatcacccgttaacgggctctgactacttgtaggcacacggtttcaggatctctttcactccccttccggggtgcttttcacctttccctcacggtactggttcactatcggtcactagggagtatttagccttgggagatggtcctcccggattccgacggaatttcacgtgttccgccgtactcaggatccactcaggagagaacgaagttttgactacagggctgttacctcctatggcgggcctttccagacctcttcatctacctcgttcctttgtaactccgtacagagtgtcctacaaccccaagaggcaagcctcttggtttgggctggtcccgtttcgctcgccgctactcagggaatcgcatttgctttctcttcctccgggtacttagatgtttcagttccccgggtctgccttctcatatcctatgtattcagatatggataccactccattacgagtggtgggtttccccattcggaaatctccggatcaaagcttgcttacagctccccgaagcatatcggtgttcgtcccgtccttcatcggctcctagtgccaaggcatccaccgtgcgccctttctaacttaaccgttaaaaagaatcactacgtgatatcttgcattacaattgaatgtgaattacttctgttatctagttttcaaagaacaacatctcgaagaatcgaatgatccttcaaaactaaacaagacagggaacgttctgtttataagacccaaggtcttatattccgttaaaatccttagaaaggaggtgatccagccgcaccttccgatacggctaccttgttacgacttcaccccaatcatctgtcccaccttcggcggctggctccataaaggttacctcaccgacttcgggtgttacaaactctcgtggtgtgacgggcggtgtgtacaaggcccgggaacgtattcaccgcggcatgctgatccgcgattactagcgattccagcttcacgcagtcgagttgcagactgcgatccgaactgagaacagatttgtgggattggcttaacctcgcggtttcgctgccctttgttctgtccattgtagcacgtgtgtagcccaggtcataaggggcatgatgatttgacgtcatccccaccttcctccggtttgtcaccggcagtcaccttagagtgcccaactgaatgctggcaactaagatcaagggttgcgctcgttgcgggacttaacccaacatctcacgacacgagctgacgacaaccatgcaccacctgtcactctgcccccgaaggggacgtcctatctctaggattgtcagaggatgtcaagacctggtaaggttcttcgcgttgcttcgaattaaaccacatgctccaccgcttgtgcgggcccccgtcaattcctttgagtttcagtcttgcgaccgtactccccaggcggagtgcttaatgcgttagctgcagcactaaggggcggaaaccccctaacacttagcactcatcgtttacggcgtggactaccagggtatctaatcctgttcgctccccacgctttcgctcctcagcgtcagttacagaccagagagtcgccttcgccactggtgttcctccacatctctacgcatttcaccgctacacgtggaattccactctcctcttctgcactcaagttccccagtttccaatgaccctccccggttgagccgggggctttcacatcagacttaagaaaccgcctgcgagccctttacgcccaataattccggacaacgcttgccacctacgtattaccgcggctgctggcacgtagttagccgtggctttctggttaggtaccgtcaaggtgccgccctatttgaacggcacttgttcttccctaacaacagagctttacgatccgaaaaccttcatcactcacgcggcgttgctccgtcagactttcgtccattgcggaagattccctactgctgcctcccgtaggagtctgggccgtgtctcagtcccagtgtggccgatcaccctctcaggtcggctacgcatcgttgccttggtgagccgttacctcaccaactagctaatgcgccgcgggtccatctgtaagtggtagccgaagccaccttttatgtctgaaccatgcggttcagacaaccatccggtattagccccggtttcccggagttatcccagtcttacaggcaggttacccacgtgttactcacccgtccgccgctaacatcagggagcaagctcccatctgtccgctcgacttgcatgtattaggcacgccgccagcgttcgtcctgagccaggatcaaactctccgataaagtagtttgactgactacgcacatcgctgtgcgatttatttaaaactttgaattaacaggtgcgttttgtcttgtttagttttcaaagatcattttgttcactttctcaagcaactttttaagtatataataagtttctcttaaagtcaacatgtttttttataaatggtggagcctagcgggatcgaaccgctgacctcctgcgtgcaaagcaggcgctctcccagctgagctaaggccccgaagtggtcgggaagacaggattcgaacctgcgaccccatggtcccaaaccatgtgctctaccaagctgagctacttcccgatttttaaaaatattatggcgcgcccgagaggagtcgaacccctaaccttttgatccgtagtcaaacgctctatccaattgagctacgggcgcataacaatgaatgccgagggccggacttgaaccggcacggtagtcacctaccgcaggattttaagtcctgtgtgtctgccaattccaccaccccggcgtggatggtatagttggagcggaagacgggattcgaacccgcgacccccaccttggcaaggtggtgttctaccactgaactacttccgcatacaggataactatcctgtataatgcgggtgaagggacttgaacccccacgtcataagacactagatcctaagtctagcgcgtctgccaattccgccacacccgcgtaacatggtgagccatgaaggactcgaaccttcgaccctctgattaaaagtcagatgctctaccaactgagctaatggctctttttaaaagacttatgttattatcttgtccaaaaatggtgccggccagaggacttgaacccccaacctactgattacaagtcagttgctctaccaattgagctaggccggcaaatatggtggaggatgacgggctcgaaccgccgaccctctgcttgtaaggcagatgctctcccagctgagctaatcctccatatattacacttacgtgtaatagcttggcggcgtcctactctcacagggggaaacccccgactaccatcggcgctgaagagcttaacttccgtgttcggcatgggaacgggtgtgacctcttcgctatcgccaccaaaccattgagagtgttctctcaaaactagataacagtaagcatacattcaaattggttaagtcctcgatcgattagtatctgtcagctccatgtgtcgccacacttccacctcagacctatcaacctgatcatctttcagggatcttacttccttgcggaatgggaaatctcatcttgaggggggcttcatgcttagatgctttcagcacttatcccgtccgcacatagctacccagcgatgcccttggcagaacaactggtacaccagcggtgcgtccatcccggtcctctcgtactaaggacagctcctctcaaatttcctgcgcccgcgacggatagggaccgaactgtctcacgacgttctgaacccagctcgcgtaccgctttaatgggcgaacagcccaacccttgggaccgactacagccccaggatgcgatgagccgacatcgaggtgccaaacctccccgtcgatgtggactcttgggggagataagcctgttatccccggggtagcttttatccgttgagcgatggcccttccatgcggaaccaccggatcactaagcccgactttcgtccctgctcgacttgtaggtctcgcagtcaagctcccttgtgcctttacactctgcgaatgatttccaaccattctgagggaacctttgggcgcctccgttaccttttaggaggcgaccgccccagtcaaactgcccacctgacactgtctccccgcccgataagggcggcgggttagaaggtcaatacagccagggtagtatcccaccgatgcctccaccgaagctggcgctccggtttccaaggctcctacctatcctgtacaagctgtaccaacattcaatatcaggctgcagtaaagctccacggggtctttccgtcctgtcgcgggtaacctgcatcttcacaggtactataatttcaccgagtctctcgttgagacagtgcccagatcgttgcgcctttcgtgcgggtcggaacttacccgacaaggaatttcgctaccttaggaccgttatagttacggccgccgtttactggggcttcaattcgcaccttcgcttacgctaagcgctcctcttaaccttccagcaccgggcaggcgtcagcccctatacttcgccttacggcttcgcagagacctgtgtttttgctaaacagtcgcctgggcctattcactgcggctctctcgggcttgcaccctaacagagcaccccttctcccgaagttacggggtcattttgccgagttccttaacgagagttctctcgatcaccttaggattctctcctcgcctacctgtgtcggtttgcggtacgggcacctctcacctcgctagaggcttttcttggcagtgtggaatcaggaacttcgctactataattcgctcgccatcacagctcagccttcacgggaaacggatttgcctatttcccagcctaactgcttggacgcggatatccaataccgcgcttaccctatcctcctgcgtccccccattgctcaaatggtgaggaggtggtacaggaatatcaacctgttgtccatcgcctacgcctttcggcctcggcttaggtcccgactaaccctgagcggacgagccttcctcaggaaaccttaggcattcggtggaggggattctcacccctctttcgctactcataccggcattctcacttctaagcgctccacaagtccttccggtcttgcttcacagcccttagaacgctctcctaccactgttcgaagaacagtccgcagcttcggtgatacgtttagccccggtacattttcggcgcagagtcactcgaccagtgagctattacgcactctttaaatggtggctgcttctaagccaacatcctggttgtctaagcaactccacatccttttccacttaacgtatactttgggaccttagctggcggtctgggctgtttccctttcgactacggatcttatcactcgcagtctgactcccaaggataagtcatcggcattcggagtttgactgaattcggtaacccggtaggggcccctagtccaatcagtgctctacctccgagactcttaccttgaggctagccctaaagctatttcggagagaaccagctatctccaggttcgattggcatttcacccctacccacacctcatccccgcacttttcaacgtgcgtgggttcgggcctccattcagtgttacctgaacttcaccctggacatgggtagatcacctggtttcgggtctacgaccacgtactcaattcgccctattcagactcgctttcgctgcggctccgcatcttctgcttaaccttgcacgggatcgtaactcgccggttcattctacaaaaggcacgccatcacccgttaacgggctctgactacttgtaggcacacggtttcaggatctctttcactccccttccggggtgcttttcacctttccctcacggtactggttcactatcggtcactagggagtatttagccttgggagatggtcctcccggattccgacggaatttcacgtgttccgccgtactcaggatccactcaggagagaacgaagttttgactacagggctgttacctcctatggcgggcctttccagacctcttcatctacctcgttcctttgtaactccgtacagagtgtcctacaaccccaagaggcaagcctcttggtttgggctggtcccgtttcgctcgccgctactcagggaatcgcatttgctttctcttcctccgggtacttagatgtttcagttccccgggtctgccttctcatatcctatgtattcagatatggataccactccattacgagtggtgggtttccccattcggaaatctccggatcaaagcttgcttacagctccccgaagcatatcggtgttcgtcccgtccttcatcggctcctagtgccaaggcatccaccgtgcgccctttctaacttaaccgttaaaaagaatcactacgtgatatcttgcattacaattgaatgtgaattacttctgttatctagttttcaaagaacaacatctcgaagaatcgaatgatccttcaaaactaaacaagacagggaacgttctgtttataagacccaaggtcttatattccgttaaaatccttagaaaggaggtgatccagccgcaccttccgatacggctaccttgttacgacttcaccccaatcatctgtcccaccttcggcggctggctccataaaggttacctcaccgacttcgggtgttacaaactctcgtggtgtgacgggcggtgtgtacaaggcccgggaacgtattcaccgcggcatgctgatccgcgattactagcgattccagcttcacgcagtcgagttgcagactgcgatccgaactgagaacagatttgtgggattggcttaacctcgcggtttcgctgccctttgttctgtccattgtagcacgtgtgtagcccaggtcataaggggcatgatgatttgacgtcatccccaccttcctccggtttgtcaccggcagtcaccttagagtgcccaactgaatgctggcaactaagatcaagggttgcgctcgttgcgggacttaacccaacatctcacgacacgagctgacgacaaccatgcaccacctgtcactctgcccccgaaggggacgtcctatctctaggattgtcagaggatgtcaagacctggtaaggttcttcgcgttgcttcgaattaaaccacatgctccaccgcttgtgcgggcccccgtcaattcctttgagtttcagtcttgcgaccgtactccccaggcggagtgcttaatgcgttagctgcagcactaaggggcggaaaccccctaacacttagcactcatcgtttacggcgtggactaccagggtatctaatcctgttcgctccccacgctttcgctcctcagcgtcagttacagaccagagagtcgccttcgccactggtgttcctccacatctctacgcatttcaccgctacacgtggaattccactctcctcttctgcactcaagttccccagtttccaatgaccctccccggttgagccgggggctttcacatcagacttaagaaaccgcctgcgagccctttacgcccaataattccggacaacgcttgccacctacgtattaccgcggctgctggcacgtagttagccgtggctttctggttaggtaccgtcaaggtgccgccctatttgaacggcacttgttcttccctaacaacagagctttacgatccgaaaaccttcatcactcacgcggcgttgctccgtcagactttcgtccattgcggaagattccctactgctgcctcccgtaggagtctgggccgtgtctcagtcccagtgtggccgatcaccctctcaggtcggctacgcatcgtcgccttggtgagccgttacctcaccaactagctaatgcgccgcgggtccatctgtaagtggtagccgaagccaccttttatgtctgaaccatgcggttcagacaaccatccggtattagccccggtttcccggagttatcccagtcttacaggcaggttacccacgtgttactcacccgtccgccgctaacatcagggagcaagctcccatctgtccgctcgacttgcatgtattaggcacgccgccagcgttcgtcctgagccaggatcaaactctccgataaagtagtttgactgactacgcacatcgctgtgcgatttatttaaaactttgaattaacaggtacgttttgtcttgtttagttttcaaagatcattttgtctttcgttcaagcgactttattattatatcttatcaatctcttgaagtcaacaactttttaaatttcttttttcgtcagcgccttgtttagcggcaacgaataataatataccacctcacaaataatagtgcaatagttttttaaaagaaaatcaaaaaagttttacgagcggcttgtttctaaaaaagcgccgtactgcgataagcagaaacggcgccttcccttttattagcgttgtctcatttgagggaataataaaacgtctctgatagacggagcatttgttaacagcatgacaaggcggtcgataccgatacccaatcccccggtcggcggcatgccgtattcaagagcttcaacgaagtcttcatccatcatatgcgcttcatcgtttccttcttctctttcttttaactgcgcttcaaagcgttccctctggtcgatagggtcattcagctccgtaaacgcattagcgtgctcacggccgacgataaacagttcaaaacggtctgtaaagcgagggtcctccggatttttcttagcaagaggagaaatctctacagggtggccgtaaataaatgtaggctgaatgagtgtttcttcaattttttgttcgaagaattcattgatgatatgacccaccgtcattgagtttgtgatctcgataccatgctcttttgcatgaccgcgcgcttcttcaacagtcatctcattccagaaatctacacctgtcgcttctttgaccgcatctaccatgtggagtcgtttccattcaggtttcagatcaatctgctcttcgccgtactggattgtggtgcttccaagcacttcctgcgcaatatgtgctacgaggttttccgtaaggctcataatatctttataatcggcgtacgcttcatacagctcgatcatcgtgaattcagggttatggcgtgtagaaacaccttcattacggaacacgcggccgatttcgtagactttttccaatccgccgacaatcaggcgtttcaggtgcagttcaatcgcaatacgcatataaagaggcatgtcgagcgcattatggtgcgtgatgaacgggcgcgcagacgctcctcccggtatgctgtgcatcgtaggtgtttcaacttctaagtatccatggtcatctaagtatcttctcatcgcttggatgattttgctgcgtgtgataaacgtttgtttgctgtcagggtttacgatgagatcgagatagcgctggcggtaacgctgttcaacgtcttttaacccatgatatttatcaggaagaggacgcagtgcttttgtcagcagttcaaaagatgtcgctttgacagaaagctcgcctacgtttgttttgaaaactttccccgtgatgccgataacgtctccgaggtctgaagatttaaagatttcatattgttcttcgccgacactgtcttttcttacgtaaatttgaatttgaccttctaagtcctgcagatgcgcaaagccggctttcccttttccgcgctttgtcatcatacggcctgcaatggtcacttcgaccgctttttcttccagttcttctttagaaagctcctggtaggcgtcaatgatctgttgagattgatgcgttctctcgaaacgttcgccgaaagggtcaatgccgttttctctcagctggttcattttatctcgtctgacttgcagctggtcgttcaattcctcatgattttgctcttcttgactcattggtatcactccgttacattttgatttcacgaaaaagcagaaaaactgccagcggtaagctggcagtgagcagcaatagagggtgtatattaacctacttttgcatcttgaagctcttttgcctctgcttcggcggtaaatgcatctaaaagctgcacaacttcttcacgcgtctcacattggttaatttcgttgcgtacattcgcattgcctctgacacctttcagataccaggcagcgtgttttctcatttctctgactgccacattttcgccttttaacttaatcaggcggtctaagtgcagtttgcataccgacattttttcacggactttcggttcgtcttttaactcgccggtttcaaggtagtgcaccgtacggtaaatcatccacgggttgccgagtgcggcccggccgatcatgacgccgtcaactcctgtttcctcaagcatgcgtttcgcgtcctgaggcgttttgacatcaccgtttccgatgacgggaatggagacggattgcttcacttctttaatgatatcccagttcgcagtgccttcatacatttgcactcttgtgcggccgtgcagggcaacggcttttccgccggcacgttcaacggcttgggcatttttcaccgcataaatgtgctcttcatcccaacccattctcatcttcactgtaaccggcttatcaacagcatctactactgcggataccatttcataaatcttatcgggatcgagaagccatttggcgcccgcatcacattttgtaatcttgggtacgggacatcccatgttaatatcaataatatcagcagtcgtgttttgatctacaaacttcgccgcttccacaagggtttccttttttcctccaaaaatctgaaggctgagcggtttttcacgttcatcaatgtaaagcatccccattgttctggcgttattgtaaagaatcgctttgtcactgaccatttcagcgcataccaatccggctccgaattcctttacagtcaatctgaacgctgagttgcagacaccggccataggggcaagcacaacccggtttttcaattgaatatcaccgattttaaacatttttcccctcctttcatttgtctatttttcaggcggggccaattcgtccgcacttatatttaaaacatctgccgcatcttgaatgatggcatctgacggcaaccggtttccgcgttcaatttcaccgacaatagaaactgatatacctaatgcttttgcaaatccttcttgagtataacctttcagctttctgaatgcacgaattcgcctaccccagatttctgcttccatactcttacaccttcttggtttgtttcagcgcttatcgtgatatgatccgcctgcgggcatatttcttttaacggcgcaaggacaaataagcgctcatacattctcggatgcggaacaatcagccgctctgtttcaatattttcacgattatacagcaaaatgtcaaggtctgccgtccgcggtccccagcgaatctctctcgttctgcctaattcagcttcaatgctctgcgttacatcaagaagttcaaaaggagataacgacgttttcacttcaaccgccatattaagaaactgatcttgatcctcatagccgacgggatctgtttcatatatggaggacacctttgacaccgtcacgccatgatgccggctgagcatggccactgcctgacgcaaataatgttcacggtcgcccatattggaaccgaggccgatatatgccgtattgttcatgatttctttctcgtcatttctatggctactgatttataatggccgggaatcggcgggtcaggcttaacaacttttaccgtacattgctgcaccggctcaaatttctcaaggacggtgtctgcgatccgttccgcaagcgtctcgaccaaattgacgggttcgccctcaacgatgccgcggcagacactgtacaattccgcatagttaatggtataagaaaggtcatccgtttttcccgctttgctcaaatccagttcggcagtcaggtctactttgaagcgctggccgagtttgttttcttcttcgaacacgccgtgatatccgtaaaactccataccttccacatatactttatccataatgtacgcctcctttgttcaacatagcatccatcatcttcgtcattcttgcgatctctttgacatcgtgcaccctcacaatgtcgcagcctttttggacgccaaggcatactgtcgctcccgttccctcggcacgttcttcagggggaaggtcaagcacacggccgatgaacctttttctcgatgtcgccagaagcagcggataacctaacccgctgaacacctccagcttgttcatgacagccagattgtcctcatagtttttcgcaaagccgatccccggatccagaatcatattttcatctgtgacgccggcttccgcggcaatttttacgctttccatcaagtctgcaagcatatcaggaataagatcgttgtagtttctttccatgcggttatgcattaagataatcggaaccccgtgtgcggcggctactgacgccatgtcaggatcacctttcgccccccagatgtcattaaggatagaggctcccgctttgaccgcttcgtctgccacggacgctttgtacgtatcgattgaaagcggaatgtccagctcgcttgtgatccgctctatgacagggatgactcgtgacatttcctcatcagccgacacgagtgatgcgccgggtcttgtcgattcaccgccgatatctatgatatgcgccccttcttcagccatcttcgccgcatgcagaagcgccctttccgtactgtcgtatttgccgccgtcagagaaggagtctggcgttacatttaatatccccataacgagcgtcttctctttataggaaagagtgcctttttttgtatgaatcagtttaggatgttcaattgtttgctgcgccattttgttcctcctcctgtacattcattttgtttatttcctgctgatactgcttacggagcaattgcaccgtttttccgctcactccgggcagcggcacttcctctattttagaaaacgggatgatttcaagcacggagtttgtcaaccatgcttcatccgcttcaagcattgattgaaaacggaatcgaccttcggtgacttctgtcccctgccgtttcaattcatcaatgacaaactgtctcgttacaccatcgagaattcccgtatccaaggatggcgtaaagaccttgtctccttttcgccaaaacacgttggagacaatgccttccgcgacatctccttctccggtcaggaaaatgccttcaaaattgggatcattcccgatctcccgtttagcatacatgttgtttaaatagtgatgggattttaaccggaaatatccttcaggcgtatttctcctgatagagagaagcctgccttctttttgaacaggcagagtttccggattgagccggttgacgaaacaaaggacggtcggcttttcataagtctgcgcggcaaaccctttatcgctgacgcctgccgagatgttaagccggacacgcgcgctgccgtccttgatctcattgaggagcaacagtctccgaagcatatcaagcagctcctgtttgttcacctcatatgcaatctgcagatcccgaagcgccctgttgagcctggcgacatgcgcatccggcagaaacggccggccgctgtaaagcctgaacgtctcgaacgcgccgatcccgtacagataaccatggtcaaaaggagaaagcgccgcttctttctcctctatatattgaccattcaaatatataatcacaccgtcacttcctttttgcggtgtgtctctataaagtttctgagcatctctttgccgaaggaggtcatgatggattccggatggaactgaacaccttcaacaggcagctcattatggcggattgccataatttctccttctttggtttgagcggataccgtaaaacaatccggcagcgtgtccgctttgacaataagtgaatggtaccgggtggcgacaagcggattttgcaggcctttaaaaatcgtctgtccgtcatgcataacttctgacgttttgccgtgcatgagccgctccgctctgacgacgtcgccgccgaatacttgcgcaatcgactgatgtccgagacatacgccgaaaataggaatactgccggcaaaatgtttgatcgcttcgaggctgatccccgcttcatcaggactgcacggcccgggtgaaatcattaagaagtccggacccagctcttcaatctgctcaatcgtaatctcgtcattccgtctgacgatcagttcctccccgagttcacccaaatattgaaccaagttgtacgtaaatgaatcataattgtcaatcattaaaatcatctctgctcacctcgtctgattttttgtctcttcttcgctcagctctaacgcctttttcatcgcaaaagcttttttgaacgattccttgtattcatgcttcggaaccgaatcaatgaccactcctgctccggactgcataaaagcatgtccgccggctgcatagatcgtccggatcacaatgttaaactgcaaatctccgttaaatccgaaccagcctatagatccagtataaagcccccgtcttgtcggctcaagctcttctataatttccatcgttctcactttgggcgctcccgtgatggtgccccccgggaataccgcatgaataatgtctgtcgcgtcatatccgtcctgcagctctccctgtacgttcgacacgatatgcatgacgtgggaatacttttcgatcgccataaattcgttaacccgcacggagccgtagcgcgatacgcgcccgaggtcattgcgctcaagatcaacaagcatgacatgttccgcacgttctttttcgttgtgaattaattcatcagccaaagccttgtcttcagcatcgtcttttcctcttgaacgcgtacccgcgatcggtctcgtttcaagcttcttccccttctttgtcaccaatagctccggcgacccgcatatcacttgaaaccccggtgtctcgagataggccatgtaaggagacggattgacgtttctcaagtgtttatacacctcatacggatgaacggataaggactgagactgcctgatggacaaattcacctggaacacatcgccgctcgtgatatattgtttaatttgttctacagcctgtgaaaatccttcctcagtgaacggagcggcgtacgatccgtccccattccgattcagcggtgaaaaaggctcgtccgccgtttggagggaacaccacatgtcctctaagcgggacagcttttcttccgcaagatccgcttcttccgcttcagtatgggtaatgagccataacgcctcttcctcatggtcataaacggccacatcatcaaaaacaagaaagtaaatatcaggtgtttccagatcatctaacgacagcatcttaaaattctcaatatatcgggcgtagtcgtaactgataaaaccaatcgcaccgccttgaaagtccggaaactcaacgtttgtttccgttccgagcgttccaaaccattcatgaaaggcccgcagcgggtcaccttctttaaacagtgtttccccctcatgcttgatcgttgtaattccgtcttttcctctgacggacgcaatcggatctagaccggctatactgaatcttccccctctcgcgctttcgagcagaacatgccgttttctcgatttcgaaaggttttcatatcgctgtaaaaatgcttgtttcgtaaaaggtatttttcttcctgccggtctgcgttgtgccatcatatcaatcctctgcttcgttttactgtagttttattttaaagcaatcacactggtgaaaaaagtgaatttcacttccaaccataaaattcgaaacgttttttggattttcgatgcttcaggcacaaaaaaactcccggatacagccgggagccgtgtgtatgtctctattcaaactgataaagcggtgtgcttaagtaacgttctccgttactagggatgatcgcaagcactttcttgcctttccccaattttttcgcgatttccagtgccgcgtaaatggccgctccggaagaaatgccgccaagaatcccttcttcttttgccgttttacgggcatattcaaatgcatcctcgtttttgacgggtatgatctgatcatagatgtccgtattcaatgtttcagggacaaatcccgctccgataccctgaattttatgcgggcccggttttccgccggaaagaactggagaatccgccggctctaccgcatagattttgatggatggatatgcttctttcagcacttcgcccgctcccgtgatggttccgccggtaccgattccggccacgaacgcatcaagctggtcgtcaccaaactgttctacgatttctttccctgtcgtttggcggtgaatttccgggtttgccgcattgttgaattgctgaggcacaaagtatccgtgttcctcggcaagttcttccgcctttttaatggcgcccttcattccttctgcgccgggagtcagcacaagctccgctccgtatgcgcgcagcagattgcgtcgctccatactcattgtatcaggcataacgagaatggctctgagacctttagccgctgccaccatcgcaagaccgattcctgtatttccgcttgtcggttcaatgattgtgtcgccggcttttaattttccttctttttcagccgcttcaatcatcgccactccgatccggtcttttacgctgctgcccggattcatgtattcaagcttcagatatacatctgcactgttttcatccgtcaggcgattcaatttcacaataggagtatttccgattagttcagtaatagaatttgcaatacgcaccatgttggacacctcaatttccgactaaatttattggtattataaatataagttatcaatttcaaaattttttgtcaatcatttagttcttttttccccgtagaaccaagagacccccgcctctttccacagcgttttgactgtcgccttgtcacctaattgatccatcgcgatctggcgtctgatttggctcttcacttcattgtatgagaaagttctcgatttaagcttttctttcagctgaatgacggcgtatcctgaagaaactttaatcggttcagcggaccattcatcttctttaagatttttagcttctgtgatatatgcctgcgggatattttcctgattttctgtcacaaagccgaggtctccgccatactgtgacgtgtatctgtccgtggaacgctcagcggcgacggcttcaaagctggaaccgcctttcaaatcagcaagcaccctgtccgcctcatctttgtttttgacgacaatgtgccggattctgtaggaatcatcaaaatggtacaattctttatttttattataaaatgattgcatttccttatccgatatatcgatgtccttcgtcagcagttcttcaagaagaatgttgtagcggatctggtctctccattctttttcggtaatatggctgtcttcataaaatgaattatctaccgctttgattaaaagaaattcccgctccaattcgctgtttgaaactgtaagtttattctttttcgcaagctcttccactacttctgcattaatcatgtcttccagagttgattttccgtactggtcttccatctttttcatccagtcttgccgtgtgatatgtttatcaccgattgtcgcgatggattcttcagatgaccccgcggcttgggattttgttaacttatacgccactatcacactgcatactaacagcgccgctacaataatcgtcaaaagtgttctcgatttcaaaatctaccccatcccttttataaaatagaacaacccgctaaagagctagcgggttgtttcgtcacgaagctcttccagttcttcttttgtaaataaatatttctcattacaaaaatggcaaaccgcttcggcttttccgtcttcttctatcatatcttgtatttcttttttgcctagtcctaaaatggccgtttcgaatcgatcttttgaacaagaacagtgaaatttgaccggcattgtttcgagaacgtccggtttttgacctagaacttcttctaagatttcttccggtgtcaggcctttttgaatcaattttgaaattggttcgatttgagataattgcttttcaattgttgaaatggtttcttcatcagtccccggaagaagctgaatgatgaacccgcccgcagcgagaatggtgttatcaggatttactagaacacctacgccgacagatgaagggacttgttcagaagaaacaagataatatgtgaagtcgtcaccgagttcacccgagacaatctctacttgtcccgtaaaataatcacgtaagcccaaatcttttacgacactgagtgttccgtcagttccgaccgcccgtctgacatccagtttcccttgttcattgagatcaaaatgaacgtgcgggtttgatacgtatgctcttacctcaccctttgcgttcgcatctgcgacaatggctccgatcgggccgccgccttctattttgactgtcagcttatcttcacccttaagcatcgctcctagcatcagagaagctgtcatcgtccggccgattgcggctgatgccgtcggccacgtgtcatgccttctttgcgcttcattaaccatatctgtcgttctggctgcataagcccgcactttaccgtcatatgcaattgctttaattaaataatccatcgtttacctcctatacgtgacccacgcgatttcgctcataaatgatttccagccctttcagagtgagaaacgggtcaacaatatcaatacaatctgattcgtttgcgattaatgacgcaagcccgcctgtcgcaatgactttcggttcctgtgttgcctgccatttcatccgctttacaatgccttcaacttgtccgacatagccgaaaaggatgccggactgcatggcgcttaccgtgtttttgccgatgatattgtccggacgggcaatttcaattcttggaagcttcgccgcacgtgagtacagcgcttccgttgaaattgtaatgccgggagcaatcgcgccgcccatgtattgtttgttttcatcaatgtagcaatacgtcgtcgccgttccgaaatcaacaacaattaaggggccgccatactgctggatcgccgcaacggcattgacgatcctgtcagctcccacttctttcggattgtcatactttatatttaaacctgttttcattcccgggccgacaacttgcggctcgatgtgaaagtattttgtgcacattctttctaaagagaacataatcggcggcaccacggatgagatgataatcccttcaatctgttcaaacatgagtccggaatgttcaaataaggagcggagcagcatgccgaattcgtcttctgttttgtgcctgctcgtttctatgcgccaatgatattctaattccccatcatgatatacaccaatcacggtgttggtgttccccacatctataaccagtaacaacctctatcaccacttttgaatagtttctaatcataacattttcaacattctacaataccatacacgatctgcggctcttttgtaaacaaaacggaaccagtaaaaaaaccgccggtatacgccggcggttttcatatcagaaagcgaactattctttcggctcgtctttcttttcgtcttctgttttagacaggatgtttactttcacatcgtctttttgaagatggtcatctgagaaattgcgctcagggagttttccgtgatccacgagatgcttgatttgttccgcatctaatgtttccacatcaagcaatgtctgagcaatcaattcaagcttatcacgattttcagtcaggatggttttcgcacgctcataacattctttaatgatgcgctgaatttcctgatcgatttcgtaagcgatctgatcactgtagttttgctcgttgttgaaatcccggcccaggaatacttgaccgccttgagattgaccgaactgaagcggtccgagtttttcagacataccgaactctgtcaccattcttctcgcaatgttcgttgcccgctggaagtcattgtgagcgcccgtgctgacttcgccgaagataatttcctcggcaacgcgtccgcccagaagaccgacaattttatcgagaagttcaggttttgtctggaagtaacggtcttctctcggaagcatgaccgcgtatccgccagcctgccccctcggaacgatcgttactttatgaaccatatcggcttcatccagcacaagtccgataacggtgtgaccgccctcgtggtacgccacgatattgcgttcttttttcgagatgacgcggctcttcttcgcaggacccgcaatgacacggtccgttgcttcatcaatgtcgcgcatatcaattttcttcttgttttgacgggcagcaacgagtgccgcttcgttaagaaggttttctaaatcggcgcctgagaaaccgggtgttcttgaagcgattgcttttaagttcaccgtttcatcaagcggtttgtttctcgcatggacctgtaatacggcttcacggccgatgacatccggacggtctaccgtaatctgacggtcaaaacgtcccggacgaagcaatgcagggtcaagaatgtccgcacggtttgtcgcagcgataataatgattccttcattcgcactgaaaccgtccatctcaacaagcagctggttcagcgtctgttcgcgttcatcatgcccgccgccaagacctgcgccgcgctgacgtcccaccgcgtcgatctcatcaatgaagatcagacaaggcgcattctttttcgcattttcgaataaatcacgcacacgggaagcaccgacaccgacaaacatttcaacgaaatcagatccgctgatgctgaagaaaggaacgcccgcttcaccggctgaggctctcgcaagcagcgtcttaccggttcccggaggtccgaccaacagcacgcctttagggattctggcgccgagctcggcgaatttgcgaggatctttcagaaactcaacaacctcaacaagctcctgcttctcctcatccgcgccggctacatctttaaacttcacgcgtttcttttcttccgtatacagcttcgctttgctctttccgaagttcatgacacggctgccgccgccctgagcctgattgagcaggaagaaaaacagaataaagatgatgacaaacggaatgatcgtcgttaagaacgtcacccacccgcttgtttcctgtgcgggatcaacttttacgtccgtctttttaattgcatcaaatatctggtctgctccttttccttcaggaacatgtgttaaaaagtactggtctttgtcgtattttttcagctgtccttttacctcataaacacctctgacaggctgaaccgatacgctatcaactttcccttcatcgaggttcttgataaacgtactgtacgacatattttctgttttcgggtttgaagtctggaagtaactcacaaccccgattactactaataaaataagtaaataaaaaatggtattacggaagacccgattcattccttacctcctcccacagtaagcacaactatgttcaatagtaccatagaaaatcattccaatacaaccgataaccatctcggaagcaggcagccgatcagctttcataaatcgccggttttaatactccgatgtaaggcagattgcgatagcgttcggcataatcaagtccgtaacccacaacaaacgcgtcaggaacttcaaagcctacgaagtctgctttaatgtccgcttttcttccgcttggtttatccaacagggtaacaatcttaattgatttcgctttacgatatcggaagagttctacgagatagctcaaggttaacccactgtcgataatatcttcaatgattaagatgtcccggccttctacagatgtatccaaatctttgatgattttgacttctccggaagaaaccgtggaatttccgtagcttgatacatccatgaagtccatttccaaatatgtatcaatatgctttataagatcagccataaaaggaagcgctccctttaacacaccgattgccaacggaaacgtgtcgctgtactcgcttgttaattgttctccaagctgttttactttcttctggatctcatcttctgagatcagcactttttcgatatcctgtttcatgttaatgcttgccccctacacttttcatgctgtctatattgtaatacaatgcggtcactgtttgaaatcacaagatcgtcaaagatggattttttcaagccaggcagccagataatttcaccgctcgcatccgttacaatcggccattcgtcccgatcccgcagaggcagtttatgatcaataaatatatctttcacctttttcgagccattcatccctttaagtttgatccggtcgccgatttttctcgtccggattgttaaaggaaattgcaccttgtttctgcttgtcataaaaacagcattcccatttttgatatgagggtcagcctgatcggccacctctatcataaagccgttggggagaacagcagtctcgccttccgctccttgcagctgcagctcaaagggaactttttcacattgccattgttcaaatgtaaacaaacatgtctgatatgatttgaccaccttcagccctttcggaaaatcaagcactcccgaggcgcttccattttccgcccattcgagaaactgctgtatgtggcgggcggaaaacgacgatggaacgttttcataaagatagtttaatattagttgaactcctcttctttgtaaaggtatcggaagggcaagcaattgagaggaattgacttcaaccgatgtgtcagacttgcttgtaataaccttattcattcgttctttcgttaatgactgcaggtattgttcgtcttctgtcagtgcttcactcaccttttgaaacattttatgaacgtcaggtgattcatgttttaaaaaaggaagcacggtctttctgaatctgtttcttgtataatcgtcttttgcattgctctcatccgttctgtagctgagcccttcttgacggcagtattcaaggatttcatcctttgccgcatagaggaaaggcctgatcagccagccggatgcaaattcgcggacgggctgcattcccgcaagccctgccccgagcgtacctttcgcaagcctcatgagcattgtctcaacctggtcatcgccgtgatgagccagcgccaaaaacttcgcttggtgttttgtcatcagatcttcgaaaaactgatatctgcaatcacgcgcggcagcctgcttgttcagcttattcttctttgcgtatgcagaaacatcaatctgtaccgtttcgcagaggatatgttccgcttcgcaatatgactgcacaaacttcatatcttcttcagattcaggacccctgaactgatggtcgacatgcgccgctatgataacggaagaatgcccgaagtgcttattcagcatactgagaagcgccattgaatcagggcctccggagaccccggcaataatcgtttctccctccgcctgaagatgatatgttttgaaaaaatcttccacgcttttcacaatgtccccctcacaatgagcaggttttttaaagatatacatatcctatcactttcattccctccaagcaaagaagaagcatgagcgcaggcgtccggccggcactagatgagaaaaaagacgatgtaagcgaaataaagggcgagaacgctgattaaaataagtgttgtttcaaacaaaccattgtgctttgcgggtttttgtttaggtttataccgcgtttgagatacagtgccctgccgcggttttgattgcggcggcttaggcttggcggcggctttccttttactccctgcactctgccccgccgtcaggatgtcatgcttcatggcttccgcagacggatattggccgtttaaagcagaaaacagaaccttcttatacttattcagaaacgggtggccttcaatgatagaacgaagctgttctttcggctgtcctgactttttgcactctttcttctggacacagtggatcatgatcattgcgacagcaaacaggtcataggatggttctgcttttcttgttccatacccccaatagcccctgtcgtaaaactccgtatactctttaatcgcgcggccctgttttgtcgttccccctacatcaatgcagcgaatggcagccggtggtccggttacaatgagattgtccggtttgaggtcgccaaaaacccacccttgctgatgaaggactgacaggctggaaagaagctgcaccatcagcaccggaatccactccgctcccttactgctgatatattgcggaagaagcggcccttctatgtactccatcacgtaaaaagagacatttttattcagctgcggaataaacgcgtcatccgcatcaaaaaaagaaggccccatcgtttgcgaccgggcctttgaaaaggattttaagacattcacttcagaggtaacagacatgctgtcgctgcttattttcaaagcgacctgtccgcctgatgcttctgccagatatacaataccgttagccccttttccaagctgtttgagcaatctgtaggatttgccgttccatttgccctgaattgccgtccccggtgccagactacatgccaaactcgttaaagcgtcgttcatcatctgccaacatgctccttcttgagcggattctctcaaactgctgcgtcgcttcccggatagcggggcccgtaggggtgataccgccggtcgacagcttcgcaaagagtgcagaaagggattcaagcttcggcgtccaattcagcacaagctcaacttcctggcttttcccgggaaatatacacattgcaaattcattttgcccggcccgggaatttaaactgatggaaagatcgatcagcgcttctttcaccgtcggcagtttcggcgccatactcgcactcgtatcaaccagcacaagcacttgcagatgaaccgtttcgccgagttcatcaaccacttccatcacttcgccgcgtttttcaggagaaagctcttccatttcaacgtttttccctaagatttgtttaagctcttgattgacgacaccttgcagcgtctgggtcattgcttttttcgtcaccatttgaaccgtctgagacaattgtgacgcatacacaacttgatggacgccgcctccggccatggcgatgccttcaacttccttcattgcctcttggtcaatcgcgttttcttccataattcctataacattcaccgtaatcccctgctccttggcgaaagccgccattgcgatcgggtcttcaccatgattggagcagccatctgtaatcagcagaacttgatttaaatgtcccttattcacatacattcctcccggtgatacgattagtcccatcttcgccagaaggaaagtgatttatacgaaatgattaagaaatctcctttttattttggaaaaccgccggcaccggtatggaagcccatttcggcgtgttgtggtcaatccggacaacaaccactgtcatatcgtcttcgatttggccggaacgcgttctgatgacctcttccattaatatatcagcgatttcttgcgggtcttcggttttcagccctttcattttccgtttcatccacaggtcgtggttttcaacgtgcttcggcccttcaaaaataccgtcactcatcatgacgagcagatctcccgcttttaactgttcacttacaacctccacgtcaaattcattgatgatgccgatcggcagattgctggcctgcactttcatgacttgatctccccgcttgataaaactcggcgttgaaccgaccttcaagaatttgcagcttgcatcctgaagatcaatgatagaaagatcgagagttgagtagatttcgtctgtcgtccgtaaagacagaatactgttgatcgtttttatcgctattttttcatcaatacctgattcgagaattttttcgagcaacttaatcgtttcattgctctcataatgggccctcgccccattgcccatgccgtcactgatcgcggccgcatattttctcgcccccagttccatcatgctgtagctgtcgccggagacaaggccgccgccttttgccgcatgagccgcgcctgtcgatacccggtacgacttggtcgaaccgaacgcaacatggctgtagccattcggatgagtcgagtgctgttcgcttttgacaagtatctgctcctcaagaatgtcagacagcatcggggcgataattttctcactctcgccgtgtcctccgctgaacgggattgtcatttcgatatcaatattgccctgctccaagctgtatatctcgacatgctgaatctcgattccgaaatgctgaagcgcctctatcatttgttcttcctgaataaaatgctgctccctctcccgttttatttcccgagaaaagtccgccatgacctcagaaacccccaacagctgctcggcaacaagccttctgctgtcctgaacttttctcttcagtgtcagatgggcgtgatggtgggcaagttcgtcctcaatcagctcttccacctgtctggatttggaacagtgctgttgaaactccttttttaatctgcggtttgaggcatactgtttttcttctgtttcatgcataacttgtttcattaagtcatatgttttatcaaagttttgaacccagcatttgcttttcttatagcaggattggcaggaatgctccgtgattttgcttaaaaagagatccacttccccttcttccgcctgctcatcagaagacgtctgatgaaaggtggcgaagctctccgacaaggcatgaaacacattggagaactggtctactttctgggcggtgacatctctgattttcctcgcgtactgctgctgttcctgactgtgctcagcagtgcccggtatgtatcgcgccacctttttcgtaatcgattggggcgtaatcaaaaacaaaacaacggcaatcaaagattcataaagagtggtcattaatccggcagatccttctccatataatgaaatcagcagtgagccgatcactaacccgactgcggctccggctttctttccttctttcagcagcccgccaagaagcccggaaaacgcaagcagactcatttgatagaggttcccgatattcgcaagcccgaggatcagtccggtcaccacaccgaccgtacagccgatgcttgccccgccgacaaaggaaaaactcagcacgacatagcgggccaggatatgttcagcctgcattccctgaaatgaaacaccggcaagcccggttaaaacggatgcgatcaagatcataaaacagatgatttcttctatttttaacgtttgcttcacttttttgatcgtgaaaatcggcaggctttgcaaaaagatcagcgtcaaaataaaggccaggcccgcctcgacaacagccatcacataatcataggtggtaaaagcgccgctctcaaaataaacaaatccgattctcgcggcagccatagagaaaaacaccacgatcggcagcatcttcacccggtcctgcacgatatatgtaccgatttttgaaagtagagtgaagacggccaaagctgtgagaatcaataaagagtgtttcggcgaaatggttaaagcgcccgcaagtaaagacagacaagcatagaaggctttatctcttctgatcaaaagcatcgctccgaaaaacggcagcgcaaacggaagaacctcagataatatgaaagcccgtccaagtaaaaaaccgatcacgacataaatgaaacccttatagaaaaaaagtgaatgcgcttgatggactgtaagctttgccgccttttcaaaaaacgattgcagtttttccagagcttgtcccgccatcggcccgttcactcttctttccgctttttccattgctctcatcccccacctgttttattcgttgcttgtcattataaatgaaagcccagataggattttgtcaaaagaaggtaacaattccaaagaactcttcgacgctttctcccttgttcccctttcctttcgtatttcctccgacatttctcaaaaagttgtctaaatatgaaaaaatcggcttctgcaacagaagccgattcgcttgatgacccgtacgggattcgaacccgtgttaccgccgtgaaagggcggtgtcttaaccgcttgaccaacgggccagatatatatggtagcggcggaggggatcgaacccccgacctcacgggtatgaaccgtacgctctagccagctgagctacaccgccatataggtgcttataagcacaagttatataatacaaaggtttcttcattccgtcaacagaaactttaaagttttaattttctgactataatggcgcgtacaaaaaaagcacccgctgggatagacggatgctccatgtatttatagaaagcagcaagttatcctcttcttgctccgcgccctccacgttttgattccgtgtttcgttttaaagatgataagcggtcttcgctatctttaagaaacttgttcattttctgttcaaaagattctttcggacggaaatcatttctaggtctggcttgcggacggtctttagcttttttaattgataaaccaattttcccgtctttttcaacgttgatgactttcacttcaacttgatcgccgacttttaaatgctcgttaatgtctttaacataattatcggctacctcactgatatgaacgagaccggttgagcctccaggcaattcaacaaatgctccgaaatttgtaatacctgttattttcccttgcaacttgctgccaacttcaatcgacataaaaaaagtgctcctccttaggcttataaaaagatcgtttgtttaattatacctaaataaaaatttaagtgtcaacaaggctacttgctcttcttttctacattgaagagaatctcaccatttcctgacataaacaagtctcttctggcaagctctgtgacgtaatcctcatcctttaatttggaaatttcatcttttaaatcagcctgtttcgcgttcaattctttcacttgtttttccagctgagctttcttttcttcgtttgcgctaagggaagaggtctgtgaccacagagaacccgctaagacaatagccgtcaacaacacaagggcgccgaatacgatcaaccgtctgaaaagccctttccgccttcttttcataagctgggattgccgttcaacctgctctttatagtcgttttggatttcagttattgtacgttctctagatagattcaaaccagacggtcctcctttcaccttttcaaaatacgtatcatggtcgatctgattgttatgattagtttcttgctcttttgtaaaaatcctgcacttttttgaaaatatcgtttgaaagtaagacgccacttttcaggaagaagtttcaataattgtttcaacaggaaaaacagcggatacagcaaaaacgttacgatcttaaaaagacacttcgcaaaaaaggcactcacccgataggagtataaagaaataaccgtgatcagcccgatgagcagcttaaagagcagaagcaccggacggaacagcacgtgctgaatgagcttttttgcgaattggtaaagagacaccgcaagatgaatggcaaatttcagtatttttatatacattcgtttaaacaggctttggtacgtcgcaatccccagtaagacagccaagaaaatgtataccctgagttccccttcattcacgttgagcagcacatagaaaaacagcagaccttgtacaatccaaaagagaatgtcatgaatgaataacagccatctggccgttttggcgcggctgacaaacagcctgtatgtatcaagcgacgctccgagccaggcgcccataccggtcattgccagcatcgtataaaattgggtggtcagcgtcatttaaacaacttgctaaaaaaccctttagctttatccccttgctgctcgtctaaatatacaaggtcaaacaccctgccttttatagatacaatccctttttccacatcaagatttttcatctgcaggttctcgcctctgacggaaagcattcccataaccgtttccagcaaaaactcttcgttgtcaaaactttctacatgcttgacgcccgaaatgtctaaatgctttctccctttcatcgttacatcatgctgttccggaacagaagaagaacctttttgctcataatatgaattcatctattcagcccccatatcctcgatacttttagcattattactgcattgtatgagacgggagccttgtttagaacaagcctattcgccgagtttttcttccttgacgattgtatacatgcccgcggcttcttcttttttcgttgtttctttcaattcgtttaccttcacggtgacaagcttctggccgaagcggaccgtcagttcatcgccggcttttacgtctgagctggctttcgcctgattcccgttaactgtgattctcccttgatcggcgacctctttcgccaatgtgcggcgtttaattaatctggatacttttaaaaacttatcaagtctcatatcagaatctcctctccatttcttttgcttcatcccacaatttgtccatttcctcaagtgacattgcggtcaattcaagtccctttgctgccgcttctttctcaatataagcaaagcgtctgcggaatttgtcatttgtcatggcgagcgcttcctcaggctcaattttatagtatcggccgatattgaccaatgcaaataaaacatcgccgaattcagcttttaagctgatttcatctgctgattcggcagaagcctctgcagaaaattccttcagctcttcatttactttatcccatatatcctgaacgtcatcccagtcaaagccggtttttgcggcttttttctgaagcttggccgcttttgcaagagaaggcagtgttttcggcacggcatccagcaatgaagtggatgttgtttgcttttccgcctttttgatttcttcccagttggcgacgacatcatgttcatcctgaaccttaacatccttaaacacatgcgggtgccgtctgaccatcttcgcactgatgtctctgatgacatcatcaattgagaaatacccctcgtcttctccgatctgggcgtgcagcataacctgaagcatgacgtccccgagttcttctatcatgtgatccgtgtcctcttcgtcaatggcctcaagcagttcgtagcattcctcaatcatatatttctttaatgactggtgtgtctgcttttgatcccacggacagccgttcggcccgcgaagctcgcgaataatacttcggaatgcagaaaattcctggtaaaggagttcttcttttttaatcggcggaacatacacgcttgttaagttatttatttctacattgcggtcaagctcaaacaaaggcaccttggtcatcttttctcccttgcttccggctgccgtgacgatgaccacttcatagtcgtcaggcaatttctccataagcgtcagcttcacctcagaggccgtcatttgatcataaacctggcaaatgatcaggtgatggcggagttcgagctcatccggcgtcattgtttgcgcatccgtaaattgaaacccttcaatcggatcaattcgcaatgcattaaaagtggcatccaaaaagctttgccctccggcagtatgaacagctacctgttgttcttcccggcgttcaaataacagctgaacggttttctcagcgacaaacggatgtccgggaacagcgtagacgacatcctcttgcttcgctttttcaaacagaatgtccgcgatctcttcatagaccgcttcaaactgatcatgtttttcataaatatcatcaaaataccggatgtccgcttccgtctcttgctctaattccggaatcaaagggtggtctttcgttcttatatataaatgcttcgcctgagtcagcagcttatgtatgcccactgtcaactgatccatgtctccggcgccgaggccgacgaccgtaatgttacctgccatgtttttctctcctctttttcaatttgcttaaagcactgccgaaaggaaggccgctcagctcttcgtccgtgaaaatcttcattcttatcatacaataaataaacaatagccctccgatgactgacgcagacagactctcacatacagctccggccctgctgacgggaacaaataactgccatagcttcatatatacgagcagaaagaagaccatcagcagactgcaccagcacagacgggcaatcacgccgccgatattcgtcagccagcccttcgaccaaattctccggagattcaggcacgcaactgcggcaaatgccaagacggtcgccagtgccgctcctctaataccccagccggggaccagccaaacattcagcacccatttcagcgcccctcccgccaaaacggatacggcggggaaaacggtatgtcccgctccttgcagaatcgcggctgctgtaagcgcaatcgaggcaaaaaagatagataagctgaatatttgtaaggtctgcgtcccctcactgttttggaaaagcatgatattcaccggctctaaaatgcaaaaaagcccggctgatgcaccgatccctaccgcaaggcagagcttgacggctgatgtcgctttctcttttatgataaacggcttattctcatgcaccgcttttgaaattgaaggaaccaatgacgcggcgatactgacggcaaacacggttcccagctgaaggagcggctgtccgcggtcatatatgcctttcagctgtttcgcggcatggctctccgtcccgtctgaaagcagtgaatataagtttaaggcgtctacaagctgaatcaaaagcatgagtacactgctgatacagatggtgactgaataaagcagcagcttttttacaatgacggccgttgcgatatgtccgccgtctttcttggtttcttcccgcttataccagaaaacagccaatacacaaagggctgccaagcttccggcaattgatcccgaggccgcccccgcaccagcggcgtataatgaacggccgcttttcaaaagccagaaggataaaccgagaagcaccgccacgcgaagaagctgttccgtaatctgggataaggctgacggcatcatatcatgcacgccttggaaatacccccggaaaaccgccgtaaacggaaacagtatgaaagcgaacgccgcgacccttatcagcatcacaaggcgggcgtcacccataaaaccggccaacggcgccgcgccgacatacatgagcgcaaacagaacaagtccggccgccgtgacataaagggcggaaattttcagtattttttgtttctgatcgctataatcgttcattaattttgagatgataaccggaaaaccggatgttgacagcatgaccgcgatccctaaaaacggatacacctgctgataaatgtaaaatccgacgtcaccgacaatattctgaaaaggaaccctgtacacggcgcttaatatcttcgttacgatacccgcaacgacgagcacaaaagcacctttccatgccgattgccgcttggcgccaactgaatcgttcatccaaaagctccttccagccgctagaaaatcacgtctataaaacgagcttattatatcacaatcctaacggccgaaccgatagagagcacatatgaatatgaaaaagaacagcacttgtataagagctgctctttctccgttttcttatttcaataatggtaataagacctactgctccatttgtctcgccaaaaaactggctgccgtttctaccgctttatgttctacttctccaagtgcctgttccttggaaaagatgaccacggcaccgataggatcgccatttgccacgatcggagctattgtataggagctcatatcttcatcaatgtcattaacaagctgcgcggacttcacgtcgttttctaccactgagctgcgctgatccatcgttttttcgagcaaatcgctgatggctttgttcagaaattcttttttcgaactgcctgaaacggcaatatacgcgtcacggtcgcaaatcaagacggaatggccgagactgtcatacaaagcatctgcatattccttcgcaaaatcgccaagctcactgataggagaatactttttcaatataacttctccgtcgcggtcaacgaatatttcaagcgggtctccttccctgattcgcagagttctccgaatttctttaggaatgacgacccgtcctagatcatcaatacgacgtacgatacctgtagctttcatctctctggtgcctctctttcatgtgatgatatttaagggaaagtactaaagctctttactttatgtagcttccgccactcgcttgaaattagtatccgtcacatcaaatgtaatatacaccagagagtaacaatttttatgaagacgcgattgtttctttcttcacatcctgaaggcctttcagcatgccgagcacggtctccagccactcttccgttttgcggcctttcgtctgtactgagattttcagctttttcccttccattcccagtccgatctgccggccgtatttattgccgagttcgaacaatttctgaccgtcaatctgtgcgctggcctcttcagaaatggtaaatctgatcgcgtctttatcctgcttgatgagttcgacgcgttcatattttccgtataccttcatctcagcaaccgtaaacagccattcaacctctttaggatagctgccgaacctgtcgatgatttcatcttgaagctcatttttctcctcaattgtggcgattgacctgaagcgtttgtacatgtcgattttttgcttgccgtcttgtatatagttttcaggaatatacgcgtcaagctcgatatcaatttctgtctcaaactgttcgcttttcggaatatcgcctttccgctcttcaatcgcttccttgagcatttgcgagtacaggtcaaaaccgactgagtcgataaagccgtgctgctgggcgccgagaaggttccccgctcccctgatcgtcaagtcacgcatggcgattttaaagcctgatcccagctcggtaaattctttaatcgcctgcagccgtttttccgccacctcagtgagcactttgtctctgcggtacgtaaaatacgcgtaagcgacgcggttggaacggccgacccgtcctctcagctgatacagctgagacagccccattttgtctccgtcgaacacaatcaaggtattgacatttggtatatctacgcctgtctcaataatagtcgtgctgacaaggacgtctgattccccttccagaaaattgagcatgacgctttccaattcattttcggtcatttttccgtgggcatatgccactttcgcatcgggaacaagcatggaaatttcatcagccttccgctcgatgtcatccacgcggttgtacaagaaatatacctgtcctccgcgcgccagttctctttcgatggcttcccgcacaagcgcgccgttgtattccacgacatatgtctgaacagggaaacggttttccggcggcgtttcaataacagataagtcccgcacaccgagcatggacatatgaagcgtgcgcggtatcggcgtcgctgtaagagtcagcacatcgacattggctttgatctgtttgattttttccttatgcgttacgccgaagcgctgctcttcatcaatgatgagcaagccgagatctttatagacgacgtctttagataagagcctgtgggttccgattacgatgtctaccgttccgtttttcaggcctttaatcgtttcattggattcttttctcgttctgaatcggctgagaagaccgatgttaatcggatagtcctggaaacgctccataatggtttcataatgctgctgcgcgagtattgtcgtcggcacaagaagcgcgacctgctttccgtcggcgatcgctttaaaggccgctcggatggctacctccgtcttcccgtaacccacatcaccgcaaagcaaacggtccatcgggcgctctctttccatatcctttttaatctcctgaatggaacggagctggtcctctgtttcctgataagggaaagcagattcgaactgccgctgcatttcatgatccggcgagaacgcatagcccttgcttgcttcccgttccgcataaagcttaatcagatcatcggcaatatcctgaacggagttttcaacttttttcttcacccgtttccattcactgccgcccagtttataaagcttcggttcttttccttcagagccgacgtacttctgcacctggtcgatttgttctacagggacgtacagcttatcgctgccctgataatgaatgttgaggtaatctttatgaatgcctttgatttctagtgtttcgatccccaaatacttaccgatcccgtggttgacgtggacgacatagtcaccgacctgaagctcggaatagcttttgatccgttcggcatttgtcagcttctgctttctcggctttttcttgattcggtttttgaacagctcttcctccgtaatgacggccagcttcatcagcggcagttcaaaaccggattgcagctcgccttccatgacatagacctgtccttgcacaagcgctttggagctgtccgtttttgcggcttcaatttcgtaatcagccagcacggatgccaatctgtcggttctgtccttatttgcgcctaaaaagacgacggtgaagtttgatttcttaaagcgctccatttcacctgcgagcacattcatctgcccgtgaaaactctgcatctgccggcttgtcacattcacgatattctgagggcttgtatgctggacatgacgcaaaaataatgaataataaatagccgggcgccgcttttcgctcataagctcctgaaagctgaaggataaatgaatgtcatgcagaattttcccttcctcgagcagacttgtcataaattcggcctcttctttttgcagctgatcctccatttcatgaatgcggctgacctcgtctaacagtaacaacgtgtctgccggtgtataatctagcaaactagcaggtttttcgtaaaagtacgagagatacttcacaagttcctgatcagtctgtcccgttgataaccgttctttatcatgtgagatattgatatgaagcatttccttttgtttgtcctgcttcagctttttcagactgtcggcaagccctttatcgagcctttccatcgcccgggctttttcttccgccctgatgatcaattccttcgccggtccgatcgccacatgtttgagcgtctcaattgatctctggtcatcagaattgaagcttctgatggaatcgacctccgtatcaaacagttcaattcgcaccggatgctccgacgtcagcggataaatgtcgataattccgccgcgaatactgaattcaccgggtgcagaaaccatatcggaacgctcataccccacctctacaaggcgcgcggacagctgatccggttctatttcgtctccgagtgaaatgacgagctggctgcttttccacagctccttcggcggaagcattcttctcactgccgcaacgggcgccacaacgaccggcgcttctccgtttgttaatctattaatgacatcaagccgctgagcacgcagttcagggctcgctaccgcaatttctgaagaaatcaattcattcacggggtataaaaaaacagattgatccccgagaagcgccgtcagatcttccgtcactttttgggcctgatataaattatgggtgataaagaaaatcggccttttcgtttcctgtgcaagggcagaggtaaaaacagaacgcgcggaacctgacagacccgcaagcagctgttccttcagcccctcatgtaaaccgttgacaatggatttaaaatcatcgctttctttaataaaggtttgaatgttgtccatatgggccctcctctctattttctgcaagaacagaaaaacgctttggtctagaatctacaccaaagcttcttattgaataaatgtgttgtgttcatggtagtgcggattgcgctccagcgcctcttggcagtcttcacaaattgtaagaacatggacatctccattgtctttatatgaaatcatatcgtttctttcctcatttgttaagtgctgaaatccaagtgactgtgtcggcaccgtcgaatattccaggctccctaccttaaagccgcagtggcggcagaaataatgcaaagccatacgttggacctcctgatgtgaaaaaatcatttttccctagtatggtctcccattatttatcttatacatttgcattaaattcgttcatgacttctaaaaatggtttcgttaaggaagcttcgcaggcttttacggtttttgtgacggcatcattgatatgcggcgcttcttccttcgtaaaagctcccagtacatagtcaacgactttcattccgttgacggggcggccgattccgattctgacccggtcaaattcaggggttccgaggtgctgtataagcgatttaattccgttatgtccgcctgcgctccccttcgtccggagcctgatttttcccgtcggaagatcaaggtcatcgtatatgactttcagatcttcatgatcggcatcataataatccagtagcggccgcaaacattcccctgataaattcatatatgtaagcggtttaacaagtagaactttttttccggaaacaaacccgattccgtaaagtccgttgaatttcgttttattcaattcaatattccattctttagaaagctcgtcaatggccataaagccgacattatgtctcgtgttctcataggttttcccggggttaccgagaccggcaatcacaagcatcgtaaatcctccctcaacatcgctgtaattcttctcattctagcacaaaagacgtaacctcgggcgggttacgtcttaaagcgcttattgattttctccttcgggctcttccccaggagacggttctgcatcttcttcgaatgcttcctgcttaggaggaaggatggaagccacgacttcttccggatcgtttgtaaatgtataattgccgtcagcagtcagatttgcgatggtcagcacatcattcatttcaagcccggaaatatcaacattgattgtctgagggatgtccttcggcttagccttaatcgaaagctcatgcagcggctgctggatgacgcctccgtctttgactcccttcgcctctcccgtcagctgaatcggcacctcggcctccagctcctcactcatattcacgacttgaaaatcggcgtgcgtcaattcgtttttgagcgggtctgtctgaagatcagtcaccataaccgattgctgatttccgttgacatcaattgtgataatcgtgttttttccttcgtcccgcaatgttttaagcaattcaacactgtctaaagagacaggcgtgttcgttatttctttaccgtatataatccctggaacatgtcctgaatgacggattttccgaagcgtcgaacgtttaaaatctgttctttcatttgcttttaaagttgccatattcagcaccatcctaattatcgttttatcgtcctattagaacaatacccacaataactgggatttaaaccttaaagtttcggtttagctgaataaatagctgacagattgtttctcgtgaacgcggataatcgcttcagccagaagcggtccgacagaaagctgcttaaagcgttcgatttttttctcatcaggaagcttaatgctgttcgttacgacaagctccttgattttagagttattgatccgctcaacggcaggacctgacagtacagggtgcgtacagcatgcatacacttctgcagctccgttttcaaccagcgcgttagcggcaagtgtgattgtgccggccgtatcaataatatcatcgatcagaatcgctgttttaccttccacgttaccgacgatgttcatcacttctacctcattcggtctaggacggcgtttgtcgataatcgcgatcggcgctttcagacggtccgcaagtttgcgggcgcgcgtcacaccgccgtggtcaggagaaacaatgacgatatctttcaagtctttaccttcaaagtaatggcctaaaatcggaacacccattaagtggtcaatcggaatatcaaagaaaccttgaatttgcggcgcgtgtaaatcaagcgcgatcacgcgtgtcgcacccgctgtttcaagcaggtttgcaaaaagttttgccgtaatcggttcacgtgatcttgcttttctgtcctggcgcgcataaccgtagtacggaatgacaatgttgattgttttcgcggaagcgcgctttaaagcgtcaaccataatcagcaattccatgatgtgctcgttgaccggcgcacttgtagactgaatgatatagcaatcacagccgcgaatactttcttctatgttgatctggacctctccgtcactgaatcttgtaacagagcactttcctaattgaacccctacattatccgcgatttcttttgcaagttctggatttgaattcaaagaaaaaatctttaaattcttatctccgtattcgttagacatggtaaacctccgattttaggattattttttatgaatgtttttcacataatcttctttatttacttgtcttgctctggcaatggcaagcgcttcgcccggcacatcttcagttacggttgaacccgcagcgacgtacgcgccttctcccactgtaacaggagcgaccagattggagttgcagccaataaaggcgccgtcttcaattttggttaaatactttttcttcccatcataattgaccgtgatggagccgcagcccagattcacatccgtgcccacttcggcatcaccgatatagcttaaatgagatgctttgcttcggtcgccgaattgtgttttcttgatttcaacaaagtttccgatcttcacttcattgccgattgcggaatcgggtctgatgtgagcaaaaggaccgatatttacatcattcccaactttgctgcgattgacaacggattgtttaatcacagtgcggctgccgattgagctgtcctctatctcagtgtgggggccgatgacacattcatcgccgatttcagcttgtccctttaacacagttccgggataaataactgtatcttgtccgatacgtgcgtcaggtgagatgtacgtattcatcggatcgattaaagtgactccgttctgcatatgccgtttgttaatacgctctttcatatacatttcagcctgagaaagagcgactctatcattcactccgagcgtctcttggaagttaccagtctggtaagcggcaacagtttcgccttcgtctttgaggatttcgatcacatccggcagataatactcgccttgggcattttcattcgaaacctgttcgatgacacgaaaaagagcctcgttatcaaaacagtacgttcccgtgttaatttctttcacaagacgttcttgctccgaagcatccttgtgctccacgattttttgaacggcgccgtcttcactgcggatgattcttccgtatccggcgggatcgtcggcaacggccgttaacaccgtggcttttgcacctttgtctgtatgttcattcagcatggcttccatcgtctccgccgtcagaagcggtgtatcgccgcaaataacgatcgtgacacccttttctccgtgaagaaatggttttgcctgtttgaccgcatgagccgtaccgagctgttctgcttggagagcgtaatcgcttttctgtccgagctgcttcttcacatcttcggcgccgtgtcctacgatggtgacaagcttcgctaaagataatttcagagcttcgtctgcgacgtgctctaccataggctttccgcataccggatgaaggaccttgtaaagcttcgatttcattctcgttccttttccggcagctaaaatcactgcaaaccgcttatccatttaatggcctccaatatcccttttatccatagaaaaatatatcctaaatagctgttgatttcaagaagacatcaaaaagtgcaagaattttctatgtaatcgctttattactgaaaaatcagatttaaaaaaggactgccggaaaaggccttgtgtcagcctttatcagcagtccttacattttgttatgtttaagaagccccggcttcttcatattctaatgcttcagaatcacccaaacgatgatactcatttaaaacagcatcctggatcttgccccgcgtgctggaattaataggatgagcaatatcgcggaattctccatcaggggtgcgtttactcggcatcgcaacgaaaagaccattgtttccatcaatcacacgaatatcatgtacgacaaattcgtgatccagcgtgatggatgcaatcgctctcatgcgaccatcggtattcacgcggcgtaatcttacgtcagtaacttccacagtagttcaccaccttttccctatataaaagcattagtctaacaattccacgattctttttaaattcctgcacgtttcaaaaagtttttttgaaaatataggatatacatacacaattaggtgataaaccatatttggggatcatatactgcataaaaaaagtgatcccggagaccggaaccacttttctgagatttaagatttcaccagcgcaatgacttcaatttccacgagagcgtctttcggcagtctcgccacttccacacaagaccttgccggcttatgtacatcaaagtattgtccgtacacttcattcacttccgcaaactgctccatatcagcaataaacaccgttgctttgacaaccgtctcgagagaagcgcccgcttctttcagcacagcttttaaattgctgaacacctgatgcgtttgttctgtgatatcaccgtttaccatttctccttcagcagtaagaggaatctggcctgagctgtaaaacatgttgtttacgatgattccctgtgaatatggcccgatcgctgccggcgcgtgttttgtatggattgcttttgtcatttttctgtctccccattctttaaatgctgttctttaaaaaatcgcagaaaattgccgttttgaatctcaatcgttttgtctttcatattgatggttgaaagcgtgagcagtgacatgtattcatcgacaagccgttcgttcactccctcggcttcaaccaagacgcctattcccgcaacgtttgcattaaactcatcaagcaggctgatcatgccgttaatggtgccgccggctttcataaaatcgtcaataatcaaaacgttcgaacccgtagccaaacttcttttcgcaagcgacatcgtttgaatgcggttagatgaccctgatacataattgatgctcaccgtggagccttccgtcaccttattgtcttttcgcacgatgacaaccggaacgttcagataactggccgctgcgtaagcaagagggattccttttgtcgcaacggtcatcaccacatcaatctcccgctccgcaaaaacggaagcaaaaagcctgcctacatgagagaggacagatggttttcctaagatatccgttaaatatacataaccgcccggaaggatacgctcaggatttactaaagactgtcccagctcctgtataaacgcttctgcttcagcctgtttcactttcggaatgtatttgacgcctccggcagctcccggcactgtaagcagcgtcccaatgccttgctgttcaaaggtctgtttaataatcgttaaatcttcactgattgatgactttgctgattgataccgttctgagaaaaacgttaacggtattaattcatgcggatgggttaacaaataatttgttaagtccaccaatctgccgctgcgacgaaacttcatgaacttacccccaaaatccgaataatttaaaaataatataacttaacatacggatttaatcaagagcattctgttcgccgatcatccgcaccgcgtacacttgatcacagaaacctcttaacccgttataaatccgctgcaccttcgattcgtattgaaccaaaccgaatacagtcggtccgcttccgctcattaacaccgcatcagcgccgaagcgtttcatttgatttttaatcatcgccacctcgggatggaggctgagcgtaaccgactccaatacgtttcctaattgtccgcataccttttggaagcttttttcttcaatcgcgtcaatcatcgcctgcacatcgggatgccgaacctgctgtaagttcagccggcggtacacttcggcagtcgataccccgatcgtcggtttggcgagcacgacccagcaatgaggcggagcactgatgtgcctgatcttctcaccgcgtccggttgccagagcagtgcccccgtatacacagaaggacacgtctgaaccgatttcagctccaagctccgcgagctcttcgacagaaagctttaaatcccaaagcctgttcagccctctgagcgtggctgccgcatcgctgcttccgccggcaagccctgccgctacagggatcacttttgtaatcataatggaaacgccttttttgacttgaaatcgttctttaagcagtttggctgcctgataagccagattcctttgatcatccggaacaaagcgattatgcgacgccactctgataacgttttcgggcagttctgtcagttcaatccgatctgccaaatcaattgtcgtcatgatcatctccacttcgtgataaccatccgggcgtttactcgtcacatcgagggacagattgattttggccggcgctttttctaaaatacgcatagctttcacctacttctccatctaaacataagtatgaacattgtatcacatttggagacccggaggtacttatccgaaattgaagccggttttgacagccgatagaaaaaaccggggaacggattgtcccccgggccactgcattatcggttattttggttctgagccgccatctgctgttcggcaatctcaatcgcgcgctttaccatattcccggcgtcacgcgcccgaatgcctccccagccctcgtttttcaccgtatcgtaaaaaccaaggtccttcgccagctcatatttgaactcatctgacataactccacgacgtctgcccaaacgaaacaaccccttttatagaattgatcaccattcgtgcacgccacgataaaacatgtgacacttatagcttccgtttaatcggctgaaactttcgagggaataattagaagagctttagaaggcaaaacaaaaagcagtaaacaaaaggttcactgcccattaaaatgctactgagcttgccgcatcgtcattgaatgtcaattcaacagtctcagtcagaatatcagcataactgtatgaaactctttcaaacgaattctcgtcttgatctagttgtatcacaaaaacagaagggtacgtctcagctaaaatgcccgaacgctcaatcgtttttcggcggccgccgtttgcttttaacgtaagccgtttacctaaattcccatcaagcgatctttttatatcggacaacgtcttcgccattgcatccacctcactacatttattgtacaacaagagcccaattttgtcaaataaaatttaaattatatcaacgttaataagtcattgtcaacaaaattattttgacaaaattctattgatttctgcgttatttttcacaagttccggaaatttatgtatcaatttgtaaaataattaacccgcatagcgaaatatatgcgggttttatcactcatccatttgatttatacggcataccgacacgcagcacacccttcgtttcaattcctcccagccctttctctctcgtcagcgtatttctcaggacatcccacacattgatccgctccataaacggagtgaagctgattttcgcgacaatatataccgggtcaagcgcatgaatattgacgcgtgacggcgaacttgcgaaattcgcgcccgctctgattaaagactcgaaatgagattggcaggcccccgcgaatatgaccagctgatccaaatgagggactttacgcctcgctctttgaacggtttcgacaaagtgtttggaatgcctgtaggcgcttaaatcgttcacgcctcccttatgcttggaatatgcatcatggccggtgatgactaaaatatccggcctgtatttatcaagcagctcgtcaattgatgccggcatttttttctcatggcaatgaattccgtataccggcacaccgattttttcataaaagttcaggcactttttcaaataggcctcatcgccgtccagatgcaatacctttccgggcatatgaaagtagtgctcctgatgctgatattgatttgtcgcataatattcctgtttttcccgaagcagcttataatcctggcggagcagctcgagagattcattcatcctgctttcatctcttttctttctcatggcctgttcgtcttttctgacaggctccaaatcagaaaaatcagcatccgcaatcaatctgacttcgtcaccatgcaggatggcaattgaatttccgttgcttgtttgctctataccgataatgcgaaataaaacatccatttgataggatttcctggctaccatatctcctatttgaaattgcacgttacccactccacaaatagactaagcctcatcatgaaagaagtcttggcaaatacacctctttccgctgcggcgcttgatgtttcaagcttttcttgcagttgaatgaataaggttctcctctagcctatgtagcggcagtccaagtggtgacgcaaaacaaaaagccctcttagaaaagggctttatgcaatccgttggacaggagcgcgaattcttctatggacagggattcaccgcgccgctttccgtcaatattcgtttcttgaagaacttcttcaatttgagcttttttctcttttccgcccggaagattgttcacaaggttgttaagcaaggttttccggcgctgtgcgaagcttgctttaatcagctggaagaaaaacggttcattatcgacgtcaaccgccgggccgtcacgaagcaagagacggatgacggcagaatcaacattaggctgaggcacaaacaccgttttcgggacggtcatgacggttttggcctccgtatagaattgaaccgcaatggaaagcgatccgtactccttagaagaaggatcagcggccatccgctcagcgacctctttttgcagcatcacgacaatcccttttaacggaagatgttcttccaagagcttcatgatgatcggcgtcgtcacataatatgggagattcgccgtcaccataatttcatcacaatcctgaaaatgctcttcaatgacggatttgacgtctgctttcagcacatcttgatgaatgatcgttacattgtcatatggagacagcgtatcattgagaatgggcaggaggcgctgatcaatttcaaacgcgacgacctttttcgcccgtttggcaagctgctctgtcagcgcgccgattccgggcccgatttcaatgactccggtccgatccgtaatttccgcatggtccacaattctgtccaatatatttgtatcaattaagaaattctgtcccagactctttttaaaagagaaaccgtactttttcagaatttccttcgttctgataggtgtcgcgatatctttattgttcatcctgttcctcctgcctcatagcatcgagcgcatcaataaaatcacttcttttgatttgaaacatttgcagccgtttttgaagctgcttgccgtttgtatagccgatcttcagcaggtcgcccaatcgttcgcggcgtcttttggcagccggtccgccgatcagaccggcctgtatgacatcttcagctgaaatctcactcggctttgcctccatctcttcatgcacattttccagacatgctctgatgctttcaatggatgcgtgctcaacgccaatgccgcgcttgtttttcggtttggcaagatgtttgggcagaaatgcgtgtttacagccgggtactgcttcagaaatggttttccggatcttttcccccggaaaatccgggtccgtcagcacgatgacccctctcgtttcctgcgccagccgaatctgtctgatgacttcgtctccgattgcggaaccgtttgtctcgatcgtatccgcatcaacggcaagttttatgcgcgcagtgtcatcgcgtccctcgactacaataatttctttaattttcattacttcctccaaaaaaactttttatatccaaaacgaaacctttgcttacatgtcacgtctaatatactgaaaatacactttacctattataacgaaaaaaacagagggcgcaaaaccctctgagtgaatcggaattaatttaagatttttattttgacctgtttctttccccagcggtaagccgaagatttttcagggaaaaagacatcaatccgtcttcctttaatggctgagcctgtatcagcggccacggcatccccgtatccgtctacgtggactcttgtgccgagcggaatgacgcttgggtctaccgcaatgactttagcattcggattgcttgtcaggttaacgcctgtagccgtatggccggaacagccgctgcagcttgcggtataagccgtggaagacacggtaatcactttaccggaagatccggtttcgccagaagatgccttcacaggtgcactgagctgctcaatcttgggactgtgccgctttgtgccgaccgcaatgatttgatctttgcttttttcagatgtttcttctttaacaagctttcttgaaacttcttttccattttctttgacaacatgaaaatgctttttaagtttgccttcttttcctttttgaacgatcttttctttcccgctgtcgagagacgcatcttctttttctttcacttgatacgctattttttcctcaactacatcggtgactttttcgatacgagtgatttgtatgccggcctgattttttgtgagcttttcgtgtaatgccggttttactttatcttcgtctttcatgtccatcttatgctgcgttaaaaagtcagcgaccgtagtcgaagtcgtccatattttctttttctttcccgcatcatttacagtgacctgaaaagccgggtcgaccgtgactttcatgccgtttgtcactttcgtatctgctgctggatctattttatcgtgctgattcacaggtgtatgctgttcgttcagaaatgcgccgactgtttttgccgttgaccataaagtcttttcttctccgcctcttgtcacacggatctgctttgcagcttcatacacgacattcatgttgtctgccaatgctgtctgcttagacggggtaatccggtcttcatttctcgtctctatatgtaaatcttccagaagttccccaaccgtttttgcatgagtgcgtatttgctttttcttgccgttgatagaaacagaaactgattgttttgagagctcatgtgccccgtatgcagtcccggttccgcccagcagaataatagctgcaataagaataaccttgcttttaccaagctttacggaaaacagttttttcattttttgtgtgatgaaaaacgcctccttctcctcggagagattatatagagtatctaaaatgctgtcaaccctcccatctcgaagatgaaaaaccttcagcgtatccctcattatgcaaaaacaaagcaaaaaaaggaagagagacatatcgacaacctatcttatgaggagaaggaagcttgtagaaccgttttacatatccactgaatcggacaagcctttacacgttacgacagcgcattctgtcagttcatgcggaaaagtctttttgcgttttcggttgtaattgaggcaatttcttcatatgtcagcccttttaattcagcgagctgttcagcaacatattttacgtagcttggctcatttcgtttaccgcggaaaggatgcggtgtcaggaaaggacagtccgtttcaatcagcaaacggtcattcggaatttcctttgctacttcttttggtttcttcgcatttttgaaggtaaccggtccgccgaatgaaatataaaaattcatatcgatacactgccgcgcaacctccgcgctccctgtaaagcagtgcataataccgccgacttcttccgccccctcttctttcaaaatcgtgacaacatcttccgttgcatcacgattatgaatgataattggaaggttcacttctttggcgagagcgatttgtttccggaatacttctttctgaatgtcttttggtgatttatcccagtggtaatcaaggcccatctctccgattgccacaactttttcgtgagaggacagttccttaatccatgataaatcttcctctgtcatgtcaattgcgtctaccggatgccagccgatcgcagcgtatataaagtcatattcctcaatcagctccatcgcacgcgtgatagtgggtttgtcgaatccgacaacgacgatccgttcaactttttcagcctttgcacgcgcaatgacttcctctaagtctgtgtcaaattgctcggcatttaagtgcgcatgtgtatcaaaaagcatcataaaaactcctttcttgttgaaaaacaaaaggtgttcgacggaatgttacacgtgaaacaccttttgcatctattatttaattcgagtgcctttcggtaatgactggtcgacagctacaactttgagaacgccgtccgattctcctgccagtatcattccttgagaaagctcgcctctcagttttaccggttttagattcgttacacaaatgatcttcattcccacaagctgatccggtgtgtaatgcttcgcgatacctgatacaacttggcgctgttcaaagcccagatcaatttgcaatttcagcagccgatctgcttttttcaccggctctgcggacaagacttctgcgacgcgaagttctgtatccataaattgatcaaacgtaatttcaggaagacgttctgcttcttgcggctcttccgccttttcttctttagcaggagcagttccttgcattttttgcttgatgtaagctacttcttcttcagcttcaagacgagggaaaagcggttccccttttttcactttcgcgttcttcaattggccgaatgtctgaatgctgtcccatgctttaagagactgatcctcaactccgagctgggcaaacattttttcaggcgtttgtgtcaagaaaggctggagcaatacggctgagatacgtaaagattcagctaaatgatacatgacggaacataattctttttctttttcctggtctttagcaagcacccacggagcagtttcatcaatatatttgttcgtacggctgattaattgccatagcgttgataaagcgactgaaaactccatgttttccattgccttttcataagctttaaccgtttcaccggctacagaagaaagctctgaatcaaaatcggtcacatttccttcatatgaaccaatctcaccgtcaaaatatttttggatcatcgcgactgtacgattcagaaggtttcctaagtcgttcgccaagtcataattaatccgttctacgaaaccttccggcgtaaagacaccgtctgaaccgaacggtacttcgcgaagcaggtaatagcgaagctcatccaagccgtagcgttcaattaacgttaccggatcaacgacatttccttttgatttcgacatttttccgtctttcatcaataaccagccatgcgcgaatacttgcttaggcagcgggagatcaagcgccatcagcataatcggccagtaaatggtatgaaaacggacaatttctttaccgacaaggtggacgtcagccggccagtactttttgtaaagctcatcattttccgtatcgtaaccgagcgctgtaatatagttgaacagtgcgtcaatccatacatacacgacatgcttcggatttcccggcacttttacgccccagtcgaacgtcgttctggaaacggccaagtcttcaagccccggtttaatgaagttgttaatcatttcatttttgcgtgattcaggctggatgaaagaaggattttcctcataaaacttcagcaggcggtctgcgtatttgctcatgcggaagaagtatgactcctctttgattaattcgaccggatggccgctgtccgggctttttccgccgacaacctcacccttctcatttcgttccacatccaccagctgtgtttccgtatagaatgtttcatcagggatgctgtaccagccctcatactcatccaggtaaatgtcaccattatcaagaagtttttgaaacactttctcgataatttctttgtgccggctttccgtcgtccggatgaaatcatcgtgagaaatgtcgagctgcttccatagtttttggatttcagcaactgcacgatccacataagcttgaggcgtgatattctcttcctccgctttctgctggattttctgtccgtgctcatccgttccggttaagtagcgtacgtcaaatccttttaatcttttgtaacgcgccatcgcatcgccggccacggtagtataagcatggccgatatgtaattttccgctcggataatatatcggggttgtaatataaaaagtattattgtcttgcggcatgttgcaacctcccattcagaatgtcgaaaagctcacgcccaaaggacgagagcggttttatttgatatacaatattgatatttgtcctctatctatgataccatcttagcctttaagatcaaggatatatacgtactgcgcgtaaaagagtaaataaaattaaaaatttttattgaaattaaaaaaagtcttaacatgtcgaaatttgtcgtatataatctactaatataaaacatcttggttcgaaagtcttgatttaaaaggattttcagtaggataataggttcgaaaaagcagtcaaaaagcctgttatttcaggatttccaaggctttacttactataagaactaattcttacaatcaatagtaaacaaaaagattgacgattattggaaaccttgttatgctaggaatgtaaggaattttgtcgaataatgacgaagaaaaatataaactacaaaataattatctctcgggaggagactgttaatgaaatctactggtatcgtacgtaaagttgatgaacttggacgcgtcgttatccctatcgaacttcgccgtacactgggcatcgcagaaaaagacgctcttgaaatttatgttgatgatgaaaaaatcatccttaaaaaatataaaccaaacatgacttgccaagtaactggtgaagtttctgatgataaccttaaacttgccggcggcaaattggtactcagcaaagaaggcgctgagcaaatcatctctgaaattcaaaaccagcttcaaaaccaaaaataagctatttcatacaaaaaccgttcttgttacgatacaagaacggttttttttatgattgaatgtgataagcgtcataaatctctcgtttcggtacgccccgatctaccgctgtttgttttatggcctgtttggaagatgctccttcgtttatgtaatgctccacatgctctttctcagaaagctccgtccaccaaggcttttcctcttcatccggttcagcggtttgatttccttcgacaacgagacagaactcaccgcggatttgatcttcatttgcccattccatcacctcggcgatggttcctctgatgaattcctcgtactttttcgttaattctctcgtgacggcgatggttcgattacccaaaacgtcatgcattgctattaatgtttcttttaatctgtgcggcgcttcgtaaaatatcatcgtttcctgccgttttttcaggatttcgagttctttcttcttttcttttttctgtctgtttaaaaatccgtagaagaaaaacggctgcggggtgatgcctgatgcggtcagcgcggttaatgccgcattagcacccgggagcggaacgacatatccgccgatttgggtgaaatctctcacaatctcagcccccgggtcggaaattgtcggcatgccggcatcactgaccaatgccacattctttccgcttttcagccattcaatgattttatggccgctgctttctttattatgttcatgatagctgatgagagatgtttctatgtcataaacatggcacagctttttcgtctgtctcgtatcttcggcagctatgacatcggccgatttcagcgtctctactgcacgaaaggtcatgtcctccaaattgccgatcggtgtaggaacaaggtacagagttcccatttcagattttccgttaaaactcatctggcgtcttaacatatacagcctccttgctgcgtcgtttttcttctatatattgctcttttttctttcgggtcagctgcttaaaacggtattccgcctgcatcgcttcccgttttgtttcaaatgattccgcatggcataacgaaaccggcctacgcgcccttgtgtacttcgcgccctttccctcattgtgggttttcagccgtttttgcagatcatttgtataaccggcatacagactgttgtcattgcacagcagcacataaaagaaatgactatttgtctccatataaaatcgtgcggatctctttcgtatattcattttgttcattgtatacgaacagcgggggaagaattttgagatcagggcggccgcctttaattccttcaaccaaaatggtattcgcttctttaccttgtttcggataaataaactgaacccgtttcggttctattcggtacgctttcattaattcaaagatttccaaaagcctccccggccgatgaacgagagccgcttttccgccttgcttcagcagtttgctgctgacggaaatcacatcttcaagcgtgcaaagaatttcgtgccttgcgattctgagatgctcgttcaggttctgctccgcctctttcggtgttttaaaataaggcggattgcaggtgacaatatcatatttattatgtccgagtctttccggcatatttttcagatcatcatgaatgagactgatctgaccgcccagcccgttgtattccacgcttcggagcgccatatcatacaagcgttcctgaatttcaaccccggtgatatcagcttttgaccttgtgctgagcaaaagcggcacaatgccgttccccgtgcataaatcaacgatgttccccttttgaatcggaacgtatgcaaacttagacagcagcacggcatctaatgaaaaagcgaaaaccgtcggactctgtactattttcatatcctctgctaataagtaatccaatctttcatcatcacgtaatgaaaccataatcttattcctttcggcactctttgaaaaaggcttccgacatcagcggaagccttttccttattttttatttaagaaggacagacaaaaaaggcaatctcccttgcggacgctcccataatggacgttgcaaatatgaaagccttcttgatacagccgggccagattgtcgtacccttctcctatatcactctgctctgccttctgtgtttttgtttctttctgatcggctttgaatttctcaatttgctctgtcgtatcatcaagccgcttacgcaaatgcttattttcaagctgaagatggtgattctcttcaatcatttcgccgatatgctgctttaagtcacccagctgacggtacagcgaaccgatttgttcctccaggtttatgacagtatcaaataactcttttttatccaaggttccacacctcgttaatctgtggtttgtgcggatacgacgccctcttccaagagctcttcccaagtatattctatcactttttcacgattcttcagttccacctgaagcacccgttccagaatattaagaccgacaacctttgcggggccgtttgccgtcgtaatcatttcgcctaaatccggcagctgttcttttgccgtctcatactcatcattttcgtacttcaaacagcacatcaaacggccgcacagaccggaaatcttcgttgggttcaacgataaattttgatccttcgccattttgatggacaccggttcaaaatcaccgaggaacgtggagcagcaaagcattctcccgcatggtccgataccgccgagcattttcgcctcgtccctcaccccgatttggcgcaattcgattctcgttttaaagatagaagccaagtctttgaccaattccctgaaatcaacccgtccgtctgctgtaaagtaaaaaatgactttattgcggtcaaatgtaaactcaacatcaaccagcttcatatctaagccgtggtcagccacttttttctgacagacttcaaaagcggacagggcctcctgtttgttttcttctacaatgagaagatcgcgttcatcagcaacgcgtatgacctttcgaagcggaagcacaacatcatgctcgtccacttgtttatttgcgatgacaacctgcccgtattcgacacctcttacggtttcaacaatgacgcagctgtcttgttctatatcaaatccgttcggatcaaaataataaattttccccgcttttttaaagcggacgcctattacgttgtacaagcttatccctcctgcaacgttaacaccaagtgctccattaatccctgcacattcacattggaatgaagccgtttttttgcttctaaaacagcgagaatttggttcgtaacgctttgttgtataaattgcagcgcatgctgttttattgattggaataagtcttgataaatcagtttatcttcatttccaatttggatggataatacatcacggtatatcaataagagcatatcaagacccatttcttgatgggttttttctttgaaaaagggcacccactgatcctgaatgaagaaaaaggcatgtcctttccgctgatgtaagacttcatacaattttatcactttcgctctggactctgcaaactcatcatttcgacttaattcgactgcttccgcaatattatttgtcatatttgctaagagccgggccatgtgagggctcacttcctgttcaatcagtctttcttctatggctttcggctgaagcggctggaacgggagaacctgacatctcgaaacgatggtatccagtattcggtggagctgctcagtaataagaattgcgatggtgtcttgactcggctcctctaaaaatttcagcagactgtttgctgcatttgtcgtcatttgatccgcatgggatataatgtacagctttttatgcgattccagtcctgttttagaaaactcttcctgaagcgattggatctgagcctttttaatggataatccgtcgggctgaaccacatggaggtcgggatggtttccggattcaatacgcttacagttccggcactccccgcaaggctcagtcccgtcttcaaggcaaaaaaagctttttgcgagaagcagtgcggcatccaatttgcccgttccttttttgccttcaaacagatatgcgtgagaaagccttttcttttcaatgctgttatgcaaaagccgcatcactctgggctgctgcccggtcatttccttccatgatattgccattgtatcactctctatgtgtaaaggttaatcaataaaccttttatttctccgattcgatccagcaaatcaattgccggtttttcctgatctaacatttcttccgtcagctgaagcagtttttcatctatttctttcacaagccccagagtccggctgcttccgtacaggtcaaagcttttctccgtctcatgcgataacccgctgtctacggcctcttttacaaaacgttttaccaatcctttgaatttcgctaagtctttgaagtttctcgacttcgtcagccttttcccgaacgtttctatatccgttaagaacctgctcagctgatcaaatttcagcttgctgctttggctgtccattgaacttttaaatgttccggaaagctctgccgctttataagcaggctgctgctttttctcaataaatgtacgtaagtcagaatttattttcacgtcgtcaaatccttaaaattgatgaaattcatcgaccgggaggacaaagaccgtcgctccgccgacttccacttcgacgggatatggaacgtaggaatccgcattcccgcccatcggggataccggggcaatcatctgatcacgtttacagccattctctttaatgaggctgagcgctttatcgacacggatatcttccaccccgatcataaacgtcgtattgcctgatttaaggaatccgcctgttgtcgcaagcttcgtcaccctgaagttgtggtcggttaatactttcaaaagcctgttgctgtcctgatcctgcaccactgccactattagtttcattctctaggccccctttaggttggaaagaacattatcgttacattcattatagcaacttatgagaaacaggtcacaactgaatttttttcaatgcttcatttatcacttgaagtgcgtcctgaatgacgagttccttctttttcgatgcgtcgattgtatggaatctttccggaaaacgctgcattaccttttggtatccttcccgtactttcgtatgaaagtgcagggcctcaagatcgagacgattcttctctcttgaatcattcgacgtaatccgtttcaacccttcttccggctcaatagaaaaatagatggtgacatcaggcatcgtatcgccgattgcaaactggttgatagaaaggacttcatcaatgccgagccctctcgcatagccttggtaagccagcgaactgtcgatgaaacgatcgcacagcacaatgcggccttctttcaatgcaggctgcaccttttcgactaaatgctgtcttctcgccgcagcgtaaagcagcgcctccgttttggcatccatcagtgtattgtttttatttaagatcacttctctgatctgttccgcaatgtcgatgccgcccggttctcttgtcgctgtcaccgggagcccctctgccgacagaatctctttcatttcctgaagcacagtcgttttccctgcaccttcaggaccttcaaatgttataaataaaccgctcatgatttctcctcttctatatagacaagtaattgttccccgtttaacaagccttgaatatgcgcgtccatgccgattaaacgggaaagcttttgtacgatctcttctgttatccgttctccgtccatgatcagcggaattcccggcggataaggaataatgttgcccgcatgcaagcgcccggccgccttatttatatctgcaggctcttttgtaaacttccgcatctcattttgcgggtattcaagtgtcgatatggacggaaatgtccaattcacggcatccggcaatttatcgggcggtgtattctccagtttctgctgtatgtttcttacggttgcctgttctatcatccgccggccgcctatcggcagtacgagcaatacttggtactcgtcagccagctcggcaacaatgccttcactctccaaaatccgttgtaatgaatagccggaatgtccgagctttgaccgaagaattaattttaacgggtccgcccgcagcccatatccagaaggctcgattatttcaatagaagaaattgatgcgaaccttcgtttgattttctcaatgtgctccatatgaacgggaagtgtccctttttcagcaatatcctgcacataagcgcgcgccgtatctaaagatgccataatcgggtatgacgggctgctgctttgcaaactgcttacataataagttaatcgatctctgtcaattctggtgctgttcaaatgaaagtaagaccccatcgtcatagccggaagcgttttgtgagccgattgaacaacggcgtctgcccccatagccaatgatgaaggcgggaaaggctggcctaacacaaagtgagccccatgagcctcatccaccagtacaggaacgccgtatgaatgggctttgttaactgccgcagtcaaatcggcagcatgcccgtagtaagtcggattggtcagaacaagtcctttcgcgttcggatatgacgccagcgctttttcgatgactgaaagggatacatgtgccggcacatgcatgttttcatcgatttccggcgccaaataaaccggcttggctccggccaatgccgccgcatggaaaacagacttgtgacaattacgctggatcagaatgggttcacccggttcacaaacagctaaaatcatcgccagattgccggcggtcgttccattgacgagaaagaaactttcctgagagccgtaaaatctgctcaccaaatcctgcgcttccttaatgacccccgtcgggtgatgcaagtcatcaagacccgtgatctcagtcatatcaatagataaaagagattgatatacagatttggcttcatcaaaaaagacatctccattgtgatgtcccggaacatgaaaagaatacgtatttcggtgcgcatgcttcatcagcgctgtatataaaggtgtgtccatttttaaacaaatccttttcctgtctttcttattatatcgtgcctgcgagccaacttaaagctaagactttttgccatctagccgttatcccggccggacctcatatcaagcagcttcttttttaaatcgccttccatgataacaagctcctcctcggcacgcctgcgtttcatcctgccttcttcttgaatagacatgatttcttcaagtgtgctgactaagctttcctgcagttttttgagggtttctgcctcaacaagtccgcgctcattggctttcgcggtctcgactgtacttgttttcagaagttcagcgtttttcagcagcaattgatttgtcgtatccgccgccttctgctgcacatctgccgcactccgctgcctcataagcgtcagcgcgatggcgacttgattcttccataaaggaatagccgtaacaatggaggactgaattttctctgccagtgcctgattcgtgttttgaatcaggcggatttgcggcgcactctgaagcgtaatctgcctgctcagcagcagatcatgcaccctcttatccagacggtcggcaaactggcgaagatcattcacttcctgcgcggccatttgattgtgtttttgtaattcggcttttcttgccgcttcaggtatcagctttgttttcagctcatctgattttaattcccccgctgctatatacatagttaaatcagaaaagtattgtttattttgggcgtacagctgatctaacaatttattgtcactcaacagcacatttttagaatgttccagccttctgctgatacggtcaatctgcacacttgtcttttgatatttcgaaagcacttcctgcacggaaccggacacccttttaaacagcctggcgaaaaaccctttgttcttcatctgcagatcatcggggtttacctggtcaagcttaatcatcagatcagccaatatttgtcccatctctcctgcatcttttctttgcacgtgctctatcatcgtatgggaaaattccagaagattcgcctgcgcctgtgaaccaaacagaacaatgctttgcatgttcccagggtccagtttttcagcgagctgaagtgccgcttctcttttttcttccggcagcgtatctgcaagctttagaggagtctggtcattttgggcgcccatgctgtcgtcggaacggtctttggccatttccttcttcctttcttattttctcagtgaatgctttgccatatctaattcaaagtgcaggtcgtcgatgtcctccttcatcagttcatgaagatcctcttccagccttctggaaagccctgccagagtcatcctcgtctcactcaaggacattgataaatctttattttttcgcggctgtgaggagagcagagcatacttttccgtcagttccacaacagaatcaagcgtttgataatagaaacgctctgcctgataaaaacgcttcggctcctgctttgtgagcagatatattcgtcgggttatccgcagtatctctgcattctgcttcagcatttgtatacttttagagcgaaaaagcgccctgcgtaatcggatgattttaccctttgcttcctcaagattttccttgatataagcatattcttttcttgtcagccggtgtttttttaaaaagagacgcttcgcattccacaggccggccgcactgacagcggctccgccggctgccccgtataaaagcgaatacagaaaaggctgatgccctatcgtaaagaaggttatccccgctaatacaaaaactgtgctgccgcaaagcgtccatttcatatattgaataaacggtttcatacttgatcgactcctatttattcacttttatcagtattatctattacattccatgtctaaacaagttcctcttcttatcgtatcagttcttttataaaaagtgtaaaaactcctctgatttcaggcaaaaaaaaaacccttttcagggttaagaatataacgtcggtgtatgaaggcttttcagtttacgaacgaaaaattcataattcggatcagaggtcggagtggaaactactttcttctcacactctaaacatataaatttcgtataaatatggattcccctgctttttttggtttcacacacaatacatgtttcttcatggctggacgtttcattcattttgcccacctccgtatgaatagccttcccttaagctgttgattgtatacacaatttggacctttttgaagtttgcaattagtatatgggcgtttccgtatttcggtgtttgttttgtttttattcaaaaacaaaaaaggcagctcatgatgagctgcctttatcataatatagcttggcggcgtcctactctcacagggggaaacccccgactaccatcggcgctgaagagcttaacttccgtgttcggcatgggaacgggtgtgacctcttcgctatcgccaccaaaccattgagagtgttctctcaaaactagataacagtaagcatacattcaaattggttaagtcctcgatcgattagtatctgtcagctccatgtgtcgccacacttccacctcagacctatcaacctgatcatctttcagggatcttacttccttgcggaatgggaaatctcatcttgaggggggcttcatgcttagatgctttcagcacttatcccgtccgcacatagctacccagcgatgcccttggcagaacaactggtacaccagcggtgcgtccatcccggtcctctcgtactaaggacagctcctctcaaatttcctgcgcccgcgacggatagggaccgaactgtctcacgacgttctgaacccagctcgcgtaccgctttaatgggcgaacagcccaacccttgggaccgactacagccccaggatgcgatgagccgacatcgaggtgccaaacctccccgtcgatgtggactcttgggggagataagcctgttatccccggggtagcttttatccgttgagcgatggcccttccatgcggaaccaccggatcactaagcccgactttcgtccctgctcgacttgtaggtctcgcagtcaagctcccttgtgcctttacactctgcgaatgatttccaaccattctgagggaacctttgggcgcctccgttaccttttaggaggcgaccgccccagtcaaactgcccacctgacactgtctccccgcccgataagggcggcgggttagaaggtcaatacagccagggtagtatcccaccgatgcctccaccgaagctggcgctccggtttccaaggctcctacctatcctgtacaagctgtaccaacattcaatatcaggctgcagtaaagctccacggggtctttccgtcctgtcgcgggtaacctgcatcttcacaggtactataatttcaccgagtctctcgttgagacagtgcccagatcgttgcgcctttcgtgcgggtcggaacttacccgacaaggaatttcgctaccttaggaccgttatagttacggccgccgtttactggggcttcaattcgcaccttcgcttacgctaagcgctcctcttaaccttccagcaccgggcaggcgtcagcccctatacttcgccttacggcttcgcagagacctgtgtttttgctaaacagtcgcctgggcctattcactgcggctctctcgggcttgcaccctaacagagcaccccttctcccgaagttacggggtcattttgccgagttccttaacgagagttctctcgatcaccttaggattctctcctcgcctacctgtgtcggtttgcggtacgggcacctctcacctcgctagaggcttttcttggcagtgtggaatcaggaacttcgctactataattcgctcgccatcacagctcagccttcacgggaaacggatttgcctatttcccagcctaactgcttggacgcggatatccaataccgcgcttaccctatcctcctgcgtccccccattgctcaaatggtgaggaggtggtacaggaatatcaacctgttgtccatcgcctacgcctttcggcctcggcttaggtcccgactaaccctgagcggacgagccttcctcaggaaaccttaggcattcggtggaggggattctcacccctctttcgctactcataccggcattctcacttctaagcgctccacaagtccttccggtcttgcttcacagcccttagaacgctctcctaccactgttcgaagaacagtccgcagcttcggtgatacgtttagccccggtacattttcggcgcagagtcactcgaccagtgagctattacgcactctttaaatggtggctgcttctaagccaacatcctggttgtctaagcaactccacatccttttccacttaacgtatactttgggaccttagctggcggtctgggctgtttccctttcgactacggatcttatcactcgcagtctgactcccaaggataagtcatcggcattcggagtttgactgaattcggtaacccggtaggggcccctagtccaatcagtgctctacctccgagactcttaccttgaggctagccctaaagctatttcggagagaaccagctatctccaggttcgattggcatttcacccctacccacacctcatccccgcacttttcaacgtgcgtgggttcgggcctccattcagtgttacctgaacttcaccctggacatgggtagatcacctggtttcgggtctacgaccacgtactcaattcgccctattcagactcgctttcgctgcggctccgcatcttctgcttaaccttgcacgggatcgtaactcgccggttcattctacaaaaggcacgccatcacccgttaacgggctctgactacttgtaggcacacggtttcaggatctctttcactccccttccggggtgcttttcacctttccctcacggtactggttcactatcggtcactagggagtatttagccttgggagatggtcctcccggattccgacggaatttcacgtgttccgccgtactcaggatccactcaggagagaacgaagttttgactacagggctgttacctcctatggcgggcctttccagacctcttcatctacctcgttcctttgtaactccgtacagagtgtcctacaaccccaagaggcaagcctcttggtttgggctggtcccgtttcgctcgccgctactcagggaatcgcatttgctttctcttcctccgggtacttagatgtttcagttccccgggtctgccttctcatatcctatgtattcagatatggataccactccattacgagtggtgggtttccccattcggaaatctccggatcaaagcttgcttacagctccccgaagcatatcggtgttcgtcccgtccttcatcggctcctagtgccaaggcatccaccgtgcgccctttctaacttaaccgttaaaaagaatcactacgtgatatcttgcattactaattgaatgtgaattacttctgttatctagttttcaaagaacacgttggtggagcctagcgggatcgaaccgctgacctcctgcgtgcaaagcaggcgctctcccagctgagctaaggccccgtattgggtaaagatggtgggcctgagtggactcgaaccaccgacctcacgcttatcaggcgtgcgctctaaccagctgagctacaggcccatctaccatatgaaagaatcaaagttccttcaaaactaaacaagacagggaacgttctgtttataagacccaaggtcttatattccgttaaaatccttagaaaggaggtgatccagccgcaccttccgatacggctaccttgttacgacttcaccccaatcatctgtcccaccttcggcggctggctccataaaggttacctcaccgacttcgggtgttacaaactctcgtggtgtgacgggcggtgtgtacaaggcccgggaacgtattcaccgcggcatgctgatccgcgattactagcgattccagcttcacgcagtcgagttgcagactgcgatccgaactgagaacagatttgtgggattggcttaacctcgcggtttcgctgccctttgttctgtccattgtagcacgtgtgtagcccaggtcataaggggcatgatgatttgacgtcatccccaccttcctccggtttgtcaccggcagtcaccttagagtgcccaactgaatgctggcaactaagatcaagggttgcgctcgttgcgggacttaacccaacatctcacgacacgagctgacgacaaccatgcaccacctgtcactctgcccccgaaggggacgtcctatctctaggattgtcagaggatgtcaagacctggtaaggttcttcgcgttgcttcgaattaaaccacatgctccaccgcttgtgcgggcccccgtcaattcctttgagtttcagtcttgcgaccgtactccccaggcggagtgcttaatgcgttagctgcagcactaaggggcggaaaccccctaacacttagcactcatcgtttacggcgtggactaccagggtatctaatcctgttcgctccccacgctttcgctcctcagcgtcagttacagaccagagagtcgccttcgccactggtgttcctccacatctctacgcatttcaccgctacacgtggaattccactctcctcttctgcactcaagttccccagtttccaatgaccctccccggttgagccgggggctttcacatcagacttaagaaaccgcctgcgagccctttacgcccaataattccggacaacgcttgccacctacgtattaccgcggctgctggcacgtagttagccgtggctttctggttaggtaccgtcaaggtgccgccctatttgaacggcacttgttcttccctaacaacagagctttacgatccgaaaaccttcatcactcacgcggcgttgctccgtcagactttcgtccattgcggaagattccctactgctgcctcccgtaggagtctgggccgtgtctcagtcccagtgtggccgatcaccctctcaggtcggctacgcatcgtcgccttggtgagccgttacctcaccaactagctaatgcgccgcgggtccatctgtaagtggtagccgaagccaccttttatgtctgaaccatgcggttcagacaaccatccggtattagccccggtttcccggagttatcccagtcttacaggcaggttacccacgtgttactcacccgtccgccgctaacatcagggagcaagctcccatctgtccgctcgacttgcatgtattaggcacgccgccagcgttcgtcctgagccaggatcaaactctccgataaagtagtttgactgactacgcacatcgctgtgcgatttatttaaaactttgaattaacaggtacgttttgtcttgtttagttttcaaagaacttcgtccatcgctcttgaagcgacttaattattgtaacatatcagtgtcgatgtcgtcaataactttttataatttcttttttaagaattcgtttcgtcatcagcgacgtatataagaataccacccttgatccaacatgtcaacaataatcgataaattaaatgatgaagcgtttaatgactatcaaagccgcgatgccgggaatccccagaatcccgctgatgcccgttgtaatcaggttaacagggatatgaataccgagactgcctccgaacaagttcacacccaccagcagaatcgcaccggcaataaacttaatcgcagtcacaccaatccatcttagcggttttgaagatactccccataaaaaaagcaaagcaaccagaccgacaatcaaaccgataatgaaaaaaggctccatgaatcttccccctcgcttgtttagtacaagcttatgagaagatcccggagaatagacctcttacttccatctgctcattttcaaattccgctgcttcgcttctttcaaataaaaaaagtacttagattcagcgactttcagctcaaacaatacctcagcggagggctcgagacttttctcgaccagactcttctgtctgttccattcttctttttgtttaaagagctgttctatcagcttctcatcaaactcttttcttaatgtatttctgcgaagaaaacccatgccttgccttttcctcccttacaattcacgtcttccttcaagagcttttgaaagagtgacctcatcagcatattccaaatcaccgccgacgggcagaccgtgggcaatacgggagagcttgatgcctgagggctttaacagccttgatatatacatcgctgttgcttccccttcaatattagggttggttgcgagaataacttctgtcacttgatcatcctgaagacgtttcagcagctccggaatcttaatatcctccgggccgatgccatccattggtgaaatcgcgccgtgaagaacatgatactggccgttatattccttcattttctccattgcgatcacatccttagggtcctgcacgacacaaataacagacttatcccttcttgtgtcctcacatatataacaagggtcttgatctgttatatgtccgcaaatcgagcaatatgtcagattccgcttcgcattgacaagcgccttagcaaaatccaatactgtgtcttctttcatacctagaacaaaaaaagccagacgaaccgctgttttcggtccgatccctggcaatttcataaagctgtcaatcagctttgatattggttcaggatactgcatgtttatttatccccctagaacaaacccggtatgttcattccttttgtaaattgtcccattgtttcattcgtcatgtcatccacttttttgagggcgtcgtttgtcgcagcaagaaccaggtcctgaagcatttcgatatcttccggatcaacgacttcttctttaatggcaatgtctacaacttctttttggccgttgacttttacagtcaccataccgccgcccgctgtgccttcaagcactttttcagcaagctcctcctgagccttcgccatatccttttgcattttttgcatttgtttcatcattttttgcatgtttcccattccgccacgcatattcaatcactctctttcatcttattagtcttttatttcgattaaatccgctccgacaagttttttcgcctctgcaatcagcggatcttcttcagccggttcgtttgatccttcactttcctgctggtgatcatttaaaaattcttctcttattttaccccattgtgcttccggaacgccaatcaaatccattcttttcccgagcattgattcgagaatctgttcaagattcgtacggactccgttattgtcttctgcaaccattttacaatggatttcgtatttaaatttaagtacaaatgccttttgagcagcagccaccggttcactgtcattcaacagagccgcatgagacaccttattctgctgtttcaggtgtgccagcagcttgccccagctgcttttaagctgttcaagttcaggtcttgtggcttccttcaatatctcatgaattcttccgaccggagctttgtaatggctttttccgcctttttgaggacgcggagcttctttcggagcgctttccatctgaaccttcacaccggaggttttcagcctttctacttcctgctcaagctgctgaatcttattcatcagcatgccgacctcaggggtgtctccggcggattgctgtgccgtctggcatattttcacgacagccacttcaaaaaagattcttgggtggttcgtccacttcatttcctgatggcttttattcaggatatcaatcatctcatataaagcgggggccggtatgtcaccgctcagattccgaaacgtttcatcgaccttcaccttctccaggactccttctaaaccgggagcggcctggtacaagagcatatccctaaaatagaaaatcatatcttcaatcagtttggccgcatctttcccttgctggagcaattcattcagtgtttccaatgcctcggaaacctgtttgcggtgaagagcagatgccagttttccaatatagtgctgagaaacggctccggtaatgagcaatgcatcatccaccgacagctcctcgccgctgaatgatacggcttgatcgagcaggctcagcgcgtccctcattcctccgtccgcagcactcgctatgatatcaagggctccttcttccaccttcagctgctctgcatcgacgattgtcttcattcgtccgacaattgctttggatgtaatccgtttgaagtcaaaacgctgacatctggagataatggttaaaggaatcttatgaggctcagtcgtagctaatatgaaaatgcaatgtgccggcggttcttccagcgttttcagaagcgcattgaatgcgccgatagagagcatatgcacctcatctataatatatactttgtaggtgacggccgacggggcgaattttactttgtcacggatgtcgcggatttcgtctacgccgttattcgacgccgcatctatttcaatcacatctgatatagagccgtttgtgatccccttgcacgccgcacattcattgcacggttcttctacgggggcgtgctcacagttgactgctttcgcaaatattttagctgcactggtttttcccgttccccgcggtccagaaaacagatatgcatgagaaaatttcttttgcaaaagggcattttgcagcgttttcgtaatgtgttcctgtccgaccacatcttcaaactgctgaggcctaaatactcgatataaagcttggtaacccacaggatgcgccctcctctgttattcatcatgtttattatacatgaacgtgcttttaacgccaaaacccgtttttcatatacgaaaaaactcacctgccataaacaggtgagtctgaaatttgatgattgatttaccgtgcaccttctgtcgattcgctaccctaagcgttacttaagcagttagctcagcccaggcaaccctgcggcacatgagaggtttcacttaatgctgcttccttccggacctgacatggttcatgaattcccattgcgcaggacccagacgtcaacgccacttacttaaggcagaccttacagtaaacgaacctcgagaagggattcggccccgctagagcggattgcgggtacagggcaccgctacctccccgcttagcacggcaaaataaatatcaaatttttatatgcgcaccattcatgatgcacacataagtatatctgcttcaggcagaaaatgcaaccgtactactcagacaactttttcctcatgtctttcttttgccggcgcagctttctgaaaaaagcgctgagcatttctccgcactcttctccgagcacgccgctcaccacttccgcttggtggttgaaccgctcttcctgcaagaggttcatcagcgttcctgtacagccccccttgggatcaaatgcgccgaatacgaccttatcgactctcgaaagcacgacggctcccgcgcacatcggacacggctccaaagtgacataaagaacggcatcctcaagtctccatgtccccagcctacggcacgcttcgtctatcgccagcatttcggcgtgggcaagcgacctctgttcagtctcccgcagattatgcgcccgcgccacgatctcatcgtgcagaacaagaactgctccgatcggcacttcacctttcgcttcggctttcttcgcttcttttatggcttctctcatataatattcatcattcataggttcgagctctcttcttaagttttttcatgtctcataaaggttaaaataggaataccccagcagaaaggagttgccggtattgtctgaacctaacaacacagcccttctgattgtcgatatgatcaacaattttcaatttgatatgggcgaacgtcttgctgaaaaaaccaaacaaattgtcccccgtattttatcattaaagaagcatgcaaaacaaagcaactggccgattatttatattaatgatcattacgggctctggaaggctgatattgatgccatcagggaggaatgcagcaacgacagaagcgcccccattataaaagaaatttcgcctcagccggatgattattttctcattaaaccgaagcattccgctttttacgaaacagcgcttcacacccttctgaccgaattacaagtgaaccgattagtcatcacggggattgccgggaacatttgtgtgctgttcacggccaacgacgcctatatgagagaatacagcattgccattccgaaagactgcaccgcttccaataacgacgaagacaatgatttcgctttgaccatgatggagaatgttctcttcgcagaaataaccacggaaaaacaaattaccgccgaaaaataaacatgatcagcctccttttttcatatatttgatagcggatatgaaaggaggcgtttttcattcagatctatatagtgaaacggggcgacacgctttccgctattgcggcgcgctaccggactgccgcaaatgtcattgcggaagcaaataaactgcctaatccaaatacattggttgtcggacaaacccttgtcatcccgattgagggtcaatattacgaagtgaaacaaggtgatactctcgcggcaatcgccggccgttttcatatatcggccgcggagcttgcgagggttaacggaattcagcccggcaccacattgagagccggaacccgcctttacattccgcagcaggcgaataagcccgatatcgaatcaaatgcatatatagaaccgcggggaacgagcgtaagcgctaatctccaacaggcggcaagggaggcctctccttatttaacatacctcggcgcattcagttttcaagtgcagcggaacgggactttaaaggaaccgcctttgaccaatttaaaaagcatcagtgacaggcacaacaccacactgatgatgatcatcaccaaccttgaaaatgacgcattcagcgatgaactcgggcggctcatcttgaatgacaatacagtgaaaacaaaactctttcaggaaatcgtctccacggctaaaaagtacggctttcgcgatattcactttgatttcgaatatttacgtccacaggacagagaagcctacaatcgttttttacgtgaagcgaggacgatttttcatcgggaaggctggaagatttcaacggcgcttgctccgaaaacgagcgcgacccaggccggcaaatggtacgaagcacatgactatagggcacatggagaaatcgtcgattttgtcgtaatcatgacatatgagtgggggtacagcggaggcccggctcaggccgtatcacctatcggccctgtaagaaatgtcattgagtacgcgctgacggaaatgccttcttcaaaaatcgttatgggccagaacatgtacggctacgattggacactgccttttaaacagggaacgacagccaaagccgtcagtcctcagcaggcaatcgctctggcagcacgccataaagtcgacattcaatatgacgaaaccgcccaggctccattctttcgttacacggatgaaaatcagagacggcatgaagtatggtttgaagacgcacgatccattcaagcgaaattcaatttaattaaagaacttcatttaagaggaatcagctattggaaactcggcctttctttcccgcaaaactggcttttgctcaacgatcaatttcatattgtaaaagagacgtttcgttaattggaagcgtcttttttcatgggcttttctgagagtgtgatacaatataaaggccggcagctgacggatgtttacagaattaaggaggattttcaatgaacagagccccttttatcgcggtagaaggtcctatcggggcaggaaaaacgacactcgctacgatgctttctgaagagctcggttttcctatgattaatgagattgtggaagacaacccttatctcgataagttttatgacaatatcgaggagtggagtttccagcttgaaatgttttttctatgtcacaggtataaacagcttgaagacaccgatcgagattatttaaaacaaggacagcccgttttgtccgattatcatatttataaaaatgttattttcgcagagcgtacattgcacggccaaaagcttgagaagtataagcagatttatcatctgctcactcacgacctgccgaaaccgaatatcattgtatacataaaggcaagcctgccgacattgcttcaacgcattgaaaaacgcgggcgcccgtttgagaaaaatatcgagcatcaatatctggaacgtctcattgcagattacgacacagccatcagacagcttcaggaagaagatccggatatatctgtactgaccattgacggtgatactgaagactttgttttgaataagacagactatgaaagaattgcccgtcaggtaaaggagcttattaaatgaaagacattcatattccaaacaacgccattatcacagtagcgggaacggtaggagtcggaaaatcgactttgaccaaagctttagcaaaacggctcgggtttcatacctcacttgaggaagtggatgaaaacccttatttagagaagttttatcacgattttgaacgctggagcttccatttgcaaatttattttctggctgagcggttcaaagagcagaaaaacatgtttgaatcaggcggcggattcgtgcaggaccgttcgatttatgaagatacaggcatattcgcaaaaatgcatgccgataaaggaaccatgtcgctgacagattacacaacatacacaagtctatttgaggcgatggtcatgacgccgtacttcccgcatcctgatgttttgatctatttagaaggcgaccttgaaaacattataaaccggattgaaaagcgaggccgcgagatggagctgcagacaaaccgctcctattgggaagagatgtatacacggtacgaagactggatcagcggttttaacgcctgccctgtgctaaaagtgcgcattgaagattatgaccttgaagctgatgaacagtcactggaacctttgatcgaaaaaatcagccgcgtgatcaacgaaaacagaaataaataaaaatagcaaagcgattttccccgaacagagaaaatcgctttttttgcatataaaaaatccgctgcatcacatgcagcggacaaaacaatctccaatatatgctcgagtttcattaggtttaaaatcaatatggcggaggaagagggattcgaacccccgcgggctttgacacccctgtcggttttcaagaccgatcccttcagccagacttgggtattcctccgtatcgacatttaataatataccacatgacctaaatttcagtcaagcgctttttcatattttttatttcatttcttaaacagcttgtccgtcagctttactatcatacaaaagtcttgcgtccaattcaacctcagtatgccatacgggcaggaaaacacagtaaaaatcaagaatagattcaaacagataacctgctcataaaggtggagaacataatgaaaatcattattgcaccggattctttcaaagaaagcatgacatcaaaagaagccgctgacagcatagaaaaaggattcaaagcggtcttccctgacgcggaatatatcaagatacctgcggccgacggcggagaaggaaccgttcaggctttgacggatgccactggcggaagcatcatcaaaaaaactgtgaccggtccgctgggaacgccggtaaacgccgcatatggacttctgggagacggacgcacggcagtcattgaaatggcggaagcatcgggacttcatctcgttccccgccatctcagagatccgttgaacacaacgacaagaggaacgggtgaactgatagcagatgcagcttcccgcggggcgggtgagatcatcatcgggcttggcgggagcgcaaccaatgacggcggaacaggaatggcgagcgcgctcggtgtgcgtttcttaaatgaggaaggtcaggagatacctgacggcggaggcgctctgcacaccctagcttctattgatataagcggtctctctcctgatctgaaacatatccgtatccgtgccgcatgtgatgtcgaaaatcctctgaccggtaaaaacggcgcgtcatatgtcttcggcccgcaaaaaggggcatccgagaagactaaagttgtattggatcgcaacttacgccatttcgctgacgtattgagacgtcagcacaatatcgaagcggataccgtaaaaggcgcgggcgccgcagggggactcggcgccggactgatcgctttcttacaggcagaacttcaaagcgggattgacgttgtattagatacactgtccttctcagatcagataagaggcgctgaccttgtcattaccggagaggggcagatagacggacaaacgctattcggcaaaacccccgccgggatcgccgcacgcgcatctgctcaagaaattcccgttatcgcattggcgggctccttaggcaaaaatttcgagcatgtttacagcgcaggaataacggctgtgttttctatcgtgcccggcgctgtaagtcttgaagacgccttagcatccggccgttttaaccttgaaagcactgcccggaatgccgccgctctataccgggcagcaaaaaaggcgcgcctctagggcgcaccttttacggtttgatgacttctttatttcccatataaggacgaagcactttcggaatgatgacacttccgtcttcctgctgatagttttctaagatggcagctactgttctgccgactgcaagacctgaaccgtttaatgtatgcacatgctccggcttgcctttcgcttcgcgtctgaatcgaatgtttgcgcgtctcgcctggaaggcctcaaagttactgcaagaagaaatttcacggtatgtgtcttggcttggaatccatacctcaatatcgtactttttcgcggctgtaaagccgagatcaccggtacacatgctcatgacacgatacggcagttcgagcagctgaagcacccgctcagcttgattcgtcagtttttcaagctcctcataagaatcttccggcttcacgaatttcacaagctcaaccttgttgaactgatgctggcggatcaaaccgcgtgtatcacggccggcagatcccgcttctgaacggaagcaagcgctgaatgcggcataattgatcggcaggttctcaccggataagatttcatcgcggtgcatatttgtaatcggcacttccgccgtcggaattaagaaataatcttcttctctgattttaaaagcatcctcttcaaatttaggaagctgtcccgtacctgtcatgctcgtacggtttaccatataaggaggaatgacttccgtgtaatcatattcatcaacgtgaagatccagcataaagttgtagagcgcgcgttcgaggcgggcgcctaatcctttataaaacacaaaccggctgcctgttacttttgaagcgcgttcgaaatcaagaatgtttaaatggtctgcgatatcccaatgcggtttcggctcatatgaaaatgccggcgcctctccccacttgcgaatttcaatgttatcatcttccgtttccccgacgggcactgagtcgtgcgggatgttcggaatagacagaaggatggtttcgagcgtcgtttcgacagtacgaagctcttcatcaagcttcttaatttcttcgcccacttcgcgcatctctttaataatatgatcagcgtcttttttctcccgtttcaaaacggcgacctgctgagatacttcattgcgttttcccttcagttcttctactttaccgataagctctcttctcttttcgtccagctcttcaaacttgtcaaagtcagataagtcttcgccttttggaatgagcttcgcttttacctcttgaaaattggctctcagcaccttcgtatcaatcatgcctaacaactcctatctgtttttatcgaaaataaaaaagagccctcatcccctaaaagggacgagagctctcgcgttgccaccctgattgaaaacaagctcacacttgcttcccgctttaacacataacggttttcccgtaaatgcctactagttttcagcatttcgctcaaggacggattcggacagcatctttcaccgattcgcaccacccatcggctctctttgaaagagaggctccctactgcttcctgtcaacgcttttcgatctttatttgtgtttataatgtactataagtatcagcggttttcaactgttttatacagctgtttcctgcttatgcttttccgccatcttcacaaacagctctgtcacccggtgatcatccgtcagttcaggatggaacgagcagccgaggaaattcccctgctttgcagccacgatgcgtccgttatgctcacaaagcacttcaacatcttctccggcttctaaaatatgcggtgcgcgaataaatacacccgtaaacggctcatcaaggcctttaatcgtcagatcagcttcaaagctgtcaacctgacggccaaaggaattacgctcgacgacaacgttcaacagccctagatgagcgttatccgttcccgctatctctttggctaaaataatcagaccggcgcatgtgccgaacatcggcttgccttgggcggcaaactcgcgaagcggctccataaaatgatatgtatccattaaacgccgcatcgtcgtgctttccccgcccggcaggattaaaccgtcgatgtcattcagctgttcaggacgcttaatgacgacaccttttgaaccacatgcttcaattgaacgaatatgttctcttactgctccttgaagtccaagtacaccaattgttaacatgcttccagctctcctatggttttaccagccgcgttcttgcatacgctgttccggcaatagatttgagatttcgatgcctttcattgctgtgcctaattctttagaaagctcagcgatcagtttgtagtctgtgtaatgagtcgttgcttcaacaattgctttggcgaatttagcagggttgtctgatttgaaaatacctgaaccgacaaatacgccgtcagcgccaagctgcatcatcaatgccgcgtcagcaggcgtcgctactccgccggcagcaaagttcactacaggcagtttgccgtcacgtttgatttgaagaagcagttcataaggagcgccgaggtttttagcttcagtcatcagctcgtcatcgctcatcgcaacaactttgcgcacttgcgcgtttacttttctcatatggcggacagcttccacaatgtttcctgttcccggttcgccttttgtacgaagcatggaagctccttcggcgatacggcgcgttgcttcgccgagatcacggcagccgcatacgaacgggactgtatattcgtttttatttaaatgaaattcttcgtcagccggagtcagaacttcactttcatcgatgtaatctactcccattgcttcaaggacacgcgcttcaacgatatgtccgatacgcgcttttgccattacgggaatggatacagcattcattacttcttcaacgattgtcggatcagccatgcgggcaacaccgccggcagcgcgaatatcagccggaacgcgttctaacgccattacggcaacagctcccgcctcttccgcaatcttcgcttgttcagcatttacaacgtccatgatgacgccgcctttttgcatttccgccatgccgcgttttacacgatcagtacctgtttgagccattatttggtccccctagtcaatgtatagttagataatttctatctcttattgtatcccagaaatacaatatttcatatgggtattcttattttatagcgagatgaataagatagatatcatttttttactaataatttggttttttcagtatattaagcaaaagagccctaactttcatcagagctctttcttatttctaaaaccagcctgttaccgtgtcaacggcgctgttccagataccggagaagaatccgccgatgccgcgcatcatctgaacaaaccagtttgctttatctacatcatttttcgtaacaagattcacgctgaactctttggttttgaggaagccatagtctttgtcactgcctttgtatgtaactgtcagcgttccgactttcgttccctttttcacaggagccgtgatttcttttttatctaaagtcacttcggctttatagttcttttcatccccgcttttcacaggaatagaaagcgccttgtcagtaacaatatcgacttgcttgtctttccctttttcaacgtcaatcgttttgtgcccttttacttgagagccttcagggtaaagatctttcattgagaaattgctgttaaatgcgtaatcgagcatttttttcgtttcatcaaaacgtccggtatgcaggttgccttttgcgtctaatacaacggtgatgacccgcattccgttccgctgtgctgtgcttgtaaaacaagatcccgcagaatcagtagaacccgtttttaagccgtcaacgccagggtattcagaaacaagaccttttaacatgaagttccagttcggcatgtccatttcatcatcagtgccggctctgaatttcgtcttagcgatgcttgttgttttgagaacttccggataatcagtgatcaggcggtctgcaagaagcgccatgtctttagcagaaacttcactttcttctttaacgccttctccttgcggctgcttgccgtgaaggtcttcattcacaagccctgtggcatttttaaagtcatagtttgtcatgcctaattctttggctttcgcattcatttcagcgacaaatttcgtttcagttccggcaagaatttcggcaactgcaatcgcggctccgttagcagagtaaatcgccatagcctgatacagttctttaaccgtgtatttgccgtcttttcgaagggggacgtttgataaactgttgtcttgagaaatttcatagacataatcatcaggagtatacgtttgatcccatttcacttttccttctttaatggcttccagaagcagatattcagtcatcatttttgtcatgctggcaatcggcagtcttttgtctgcatttttactgtataaaatttttcccgatgaagcctcaatcattatcgcagctgatgcgttgacatcaatcgggtcattgccggctgcctccgctttagacatcggaacaaagcaagttgcggccagtgccagtaccactaatgacaccaacagctgtttccatttcgtgatgttcaatcttacgacctccgtcattcattttaaatctataattaagccgttaaggacatattcaaattcaaaacacaacagtataaattttatcacactcgatataaaaaaaatagacagagtcagcgaccctgtcaaatgttttttatttgtaacaattatgagattgtatagtttggtgattctttcgtaatttggacatcatgcggatgactttcgcgaagtccggcacctgtcatacggatgaattgagcctcttctcttaaagcgcgcaagtcttttgaaccgcaatatcccatacctgaacgaagaccgccgacaagctgatacactgtttcttctacaggacctttgtacggagtccgtccttcgataccttcagggacgaatttcttattttcttcttggaaatatcggtctttactgcctttttccatggcagcgacagaacccataccgcgatacactttaaatcttctgccttgatagatttcagtctctcccgggctttctgaagtaccggcaagcaggcttccgagcattacagcatgtccgcctgaagccaacgcttttgtaatatctccggagaatttaataccgccgtctgcgataattgtcgcgccgtgttttctcgcttcagtggcacaatcataaatggcagtgatctgcggtacgcctacacctgcaacgacgcgtgtcgtacagatagaaccaggtccgattcccactttgacaatatttgctccggcttcaatcagagcttttgtcgcttcagccgttgcaacatttcctgcgataatgttcagttcaggatatgtttcacggattttcgcgactgtgttcagtacgcctctggaatgtccgtgagccgtatcaaccacgataacgtcgacattcgcttcaacaagcttgctgacgcgtgtcattgtatcgcctgtcacgcctaccgcagcgccgacaataaggcgtccgtgttcatctttagatgaattcgggaattcgataaccttttcaatatctttgatcgtaataagaccctttaatttgttttggtcatccactaacgggagtttttcaattttatgtttctgtaagattttttctgcttcgtctaatgtggttcccacagaagccgtaaccagctcttcttttgtcatgacatcactgattttcattgaataatcagagataaagcgaagatcacggtttgtaatgataccgacaagcttttgatcgtctttattatctacgatcggaacaccggaaattctgtatttccccatcaaatgctccgcatcgaatacttgatgatcaggtgttaaaaagaagggatttgtaataacgccccgttcagaacgtttgactttgtcaacatgttcagcctgctgttcgatggacatgtttttatggataatgcccaagccgccctgtctggccatcgcaatcgccatagctgattctgttactgtatccattcccgcactgatgacaggaatattaagctttaacgtctttgtcagttcaacagataaatccacatcacgcggaagtacgtctgattgagccggtacgagcagtacatcatcgaacgttaagccttcttttgaaaatttactttcccacattagtaaatccccctcttttcggcaaaatattatatgtagattatcaactagaaaacagcatgtcaaggaagcgaaaaagagttgaaatatttagataaaggaaagggtttaaaaatacatatgagagatcatgagtggaaagagttatcattattttattctgtagaatcttcccagaaatttctaaataaagtctatacagaaagcagcatggaagaaccaaaacgatatgcgtttaagaacagtgagcgcttcatattctttatcaaacacgccgagtccttctataagcaggcatctctttcccctttagaaattaagcctattctgttgttttacgggatgtcacaattgctgaaagcctgtcttctgaccacagatccaagctatccaagccacgcctcagtactcgcgcatggcgtgactgcccggaaacgcaaaaagcaaaattactcctttagggatgatgaagtgaaggtgcagcgcaatggtttatgtattcatgtaatgaagcacttattcgggatagctggtcttgaggaagaacggtacacaatgaagaaattgctgacagccatacctgaattgcatactgtcttttacttccaagagaaaaagaattggctgacccgtgtagagctgaaagatgaccttatttcagtgcctgagcatgcggtgattcattacaatatgtctgattcccgctttgctgaatatatcagccatcatttgaagtggtcttttctgaggaaagaccataaccacttggtttttgaggctgacccgatagacagagaaccttggtcttcgccaaatttattgtttcacttggagaaaaatcaatattacattccctctcagcgtgatcacttcctgcatcttccggaaatgattattcattatttggtcctctacaatatcgggatgattgcgagatatgaaacggagtggtggtatgaactgctgacacagcatgtcagtgatgattatgtgatgatccgccggttcttagaggtcacggaacgcaaatttccgtattacgtttctaatttcctgaagcagtacttataaacaaaaaaggcagctcatgatgagctgcctttaccgtaatgatagcttggcggcgtcctactctcacagggggaaacccccgactaccatcggcgctgaagagcttaacttccgtgttcggcatgggaacgggtgtgacctcttcgctatcgccaccaaaccattgagagtgttctctcaaaactagataacagtaagcatacattcaaattggttaagtcctcgatcgattagtatctgtcagctccatgtgtcgccacacttccacctcagacctatcaacctgatcatctttcagggatcttacttccttgcggaatgggaaatctcatcttgaggggggcttcatgcttagatgctttcagcacttatcccgtccgcacatagctacccagcgatgcccttggcagaacaactggtacaccagcggtgcgtccatcccggtcctctcgtactaaggacagctcctctcaaatttcctgcgcccgcgacggatagggaccgaactgtctcacgacgttctgaacccagctcgcgtaccgctttaatgggcgaacagcccaacccttgggaccgactacagccccaggatgcgatgagccgacatcgaggtgccaaacctccccgtcgatgtggactcttgggggagataagcctgttatccccggggtagcttttatccgttgagcgatggcccttccatgcggaaccaccggatcactaagcccgactttcgtccctgctcgacttgtaggtctcgcagtcaagctcccttgtgcctttacactctgcgaatgatttccaaccattctgagggaacctttgggcgcctccgttaccttttaggaggcgaccgccccagtcaaactgcccacctgacactgtctccccgcccgataagggcggcgggttagaaggtcaatacagccagggtagtatcccaccgatgcctccaccgaagctggcgctccggtttccaaggctcctacctatcctgtacaagctgtaccaacattcaatatcaggctgcagtaaagctccacggggtctttccgtcctgtcgcgggtaacctgcatcttcacaggtactataatttcaccgagtctctcgttgagacagtgcccagatcgttgcgcctttcgtgcgggtcggaacttacccgacaaggaatttcgctaccttaggaccgttatagttacggccgccgtttactggggcttcaattcgcaccttcgcttacgctaagcgctcctcttaaccttccagcaccgggcaggcgtcagcccctatacttcgccttacggcttcgcagagacctgtgtttttgctaaacagtcgcctgggcctattcactgcggctctctcgggcttgcaccctaacagagcaccccttctcccgaagttacggggtcattttgccgagttccttaacgagagttctctcgatcaccttaggattctctcctcgcctacctgtgtcggtttgcggtacgggcacctctcacctcgctagaggcttttcttggcagtgtggaatcaggaacttcgctactataattcgctcgccatcacagctcagccttcacgggaaacggatttgcctatttcccagcctaactgcttggacgcggatatccaataccgcgcttaccctatcctcctgcgtccccccattgctcaaatggtgaggaggtggtacaggaatatcaacctgttatccatcgcctacgcctttcggcctcggcttaggtcccgactaaccctgagcggacgagccttcctcaggaaaccttaggcattcggtggaggggattctcacccctctttcgctactcataccggcattctcacttctaagcgctccacaagtccttccggtcttgcttcacagcccttagaacgctctcctaccactgttcgaagaacagtccgcagcttcggtgatacgtttagccccggtacattttcggcgcagagtcactcgaccagtgagctattacgcactctttaaatggtggctgcttctaagccaacatcctggttgtctaagcaactccacatccttttccacttaacgtatactttgggaccttagctggcggtctgggctgtttccctttcgactacggatcttatcactcgcagtctgactcccaaggataagtcatcggcattcggagtttgactgaattcggtaacccggtaggggcccctagtccaatcagtgctctacctccgagactcttaccttgaggctagccctaaagctatttcggagagaaccagctatctccaggttcgattggcatttcacccctacccacacctcatccccgcacttttcaacgtgcgtgggttcgggcctccattcagtgttacctgaacttcaccctggacatgggtagatcacctggtttcgggtctacgaccacgtactcaattcgccctattcagactcgctttcgctgcggctccgcatcttctgcttaaccttgcacgggatcgtaactcgccggttcattctacaaaaggcacgccatcacccgttaacgggctctgactacttgtaggcacacggtttcaggatctctttcactccccttccggggtgcttttcacctttccctcacggtactggttcactatcggtcactagggagtatttagccttgggagatggtcctcccggattccgacggaatttcacgtgttccgccgtactcaggatccactcaggagagaacgaagttttgactacagggctgttacctcctatggcgggcctttccagacctcttcatctacctcgttcctttgtaactccgtacagagtgtcctacaaccccaagaggcaagcctcttggtttgggctggtcccgtttcgctcgccgctactcagggaatcgcatttgctttctcttcctccgggtacttagatgtttcagttccccgggtctgccttctcatatcctatgtattcagatatggataccactccattacgagtggtgggtttccccattcggaaatctccggatcaaagcttgcttacagctccccgaagcatatcggtgttcgtcccgtccttcatcggctcctagtgccaaggcatccaccgtgcgccctttctaacttaaccgttaaaaagaatcactacgtgatatcttgcattactaattgaatgtgaattacttctgttatctagttttcaaagaacacgttggtggagcctagcgggatcgaaccgctgacctcctgcgtgcaaagcaggcgctctcccagctgagctaaggccccgtattgggtaaagatggtgggcctgagtggactcgaaccaccgacctcacgcttatcaggcgtgcgctctaaccagctgagctacaggcccatctaccatatgaaagaatcaaagttccttcaaaactaaacaagacagggaacgttctgtttataagacccaaggtcttatattccgttaaaatccttagaaaggaggtgatccagccgcaccttccgatacggctaccttgttacgacttcaccccaatcatctgtcccaccttcggcggctggctccataaaggttacctcaccgacttcgggtgttacaaactctcgtggtgtgacgggcggtgtgtacaaggcccgggaacgtattcaccgcggcatgctgatccgcgattactagcgattccagcttcacgcagtcgagttgcagactgcgatccgaactgagaacagatttgtgggattggcttaacctcgcggtttcgctgccctttgttctgtccattgtagcacgtgtgtagcccaggtcataaggggcatgatgatttgacgtcatccccaccttcctccggtttgtcaccggcagtcaccttagagtgcccaactgaatgctggcaactaagatcaagggttgcgctcgttgcgggacttaacccaacatctcacgacacgagctgacgacaaccatgcaccacctgtcactctgcccccgaaggggacgtcctatctctaggattgtcagaggatgtcaagacctggtaaggttcttcgcgttgcttcgaattaaaccacatgctccaccgcttgtgcgggcccccgtcaattcctttgagtttcagtcttgcgaccgtactccccaggcggagtgcttaatgcgttagctgcagcactaaggggcggaaaccccctaacacttagcactcatcgtttacggcgtggactaccagggtatctaatcctgttcgctccccacgctttcgctcctcagcgtcagttacagaccagagagtcgccttcgccactggtgttcctccacatctctacgcatttcaccgctacacgtggaattccactctcctcttctgcactcaagttccccagtttccaatgaccctccccggttgagccgggggctttcacatcagacttaagaaaccgcctgcgagccctttacgcccaataattccggacaacgcttgccacctacgtattaccgcggctgctggcacgtagttagccgtggctttctggttaggtaccgtcaaggtgccgccctatttgaacggcacttgttcttccctaacaacagagctttacgatccgaaaaccttcatcactcacgcggcgttgctccgtcagactttcgtccattgcggaagattccctactgctgcctcccgtaggagtctgggccgtgtctcagtcccagtgtggccgatcaccctctcaggtcggctacgcatcgtcgccttggtgagccgttacctcaccaactagctaatgcgccgcgggtccatctgtaagtggtagccgaagccaccttttatgtctgaaccatgcggttcagacaaccatccggtattagccccggtttcccggagttatcccagtcttacaggcaggttacccacgtgttactcacccgtccgccgctaacatcagggagcaagctcccatctgtccgctcgacttgcatgtattaggcacgccgccagcgttcgtcctgagccaggatcaaactctccgataaagtagtttgactgactacgcacatcgctgtgcgatttatttaaaactttgaattaacaggtacgttttgtcttgtttagttttcaaagaactttgttgcttctctcgaagcgacctcttaatcataacattttcagtttgctaggtcaatacttttttaaaaaatattttcgctaggcttgcctttctattaaaaagacaacaaaaagaattatatcagtatcatcgctatgtgtcaaagctttttttcatttctttatatagtaaaagcgcagcctgttgcagctgcgctttttcgtttatacttcttccgtttcttccggctcttcttcattcttttccacaagcgccacagtggctacatgctcttgatcagacatgcggatcagacggacgccttgtgttacgcgtcccgtagtggaaatatcattaatatccattctgattaacacgccgcttgccgtaataatcattaagtcctcttcgccttttgttgctttcacggttactaacggaccgttgctgtcagtgattttacatgttttaaggccttttccgcccctgctttgaactctgtattctgaagccggtgtgcgtttgccgtagccgttttctgtcactatgaggacatgggagtcttcttcaagaatctccatgcctactacgacatcatcgtctgtcagcgtgatgcctttaacacccgcagctgtgcgtcccatttgtcttacatctgcttcagggaaacggatcagcaaaccgttcttcgttccgatgatgatttgtttcttgccgtcagtcaggcggacggccatcagttcatcgtcttcccggagacctagggcgatcagcccgttattccgtatattcgcaaactgggacagtgccgtacgtttcgacaccccttgtttggtcgtaaagaagaggtattgctcctcatcaaacgtgctgaccggaataatagcattaatccattcgcctttttcaacctccagaaggttaataatcggaatgccttttgccgtacggccgtattcagggatttcatatcctttagaacggtataccttccctttattagagaagaacaggatcgtatcgtgcgttgatgtggaaattaagtgttccacaaagtcatcttcattcgttcccattccctgtacgccttttccgccccgtttttggctgcggtatgtggacgccgggagacgtttaacatagccgttatgggtcagtgtgatgacgatattttctctctcgataagatcttcatcttcaattgtttcaagaccggacgtcacgatttcagtgcgtctctcatcattgaaacgctctttgatttcattgagctcttcacgaatgatctcaagaactcttgcttcattggctaaaatatctttcagctcggcgataagcgcaacaagtgattgatattcctcttcaatcttttcgcgctccagaccggttaatcgctgaaggcgcatatccagaatggcttgcgcttgtttttcagtcagtgagaattgttcgatcaaacctgttctcgcaatttcagccgtctgggaattgcggataagagaaataacggcatctaaatgatcgagagcaattcttaaaccttccagaatgtgagctctcgcttccgctttgcggagttcgtaagccgttctgcgccggatcacaaccttttggtgatcaagataatgctccagacattgtttcaggcttagtaccttcggctgtccgtcaacgagcgccagcaggttgattccgaaagacgtctgcagggccgtttgtttgtacaggttattcaaaatgacgtgagcattggcgtcacggcgaatctcaatgacgattctcattccgttacggtcggattcgtcacgcagatccgtaattccttcgatttttttgtcccggacaagatctgcgattttttcaattaatctcgctttgttcacctgataaggaagttccgtgacaataattctttcttttcccgatgatgtctcttcgatttcagccttagcccggatcgtaatggatccccgtccggattcatatgccttgcggatgccgctccggcctaaaatctgacctgcagtcggaaaatccgggcccgggatgtattccatcagctcctggtttgtaatctcaggattctcacttacggcaagcacgccttcaatgacttccccaagctgatgcggaggaatatttgtcgccattccgaccgcaataccggcagctccgttgacgagcagattcggaaatctcgaaggcatgacgacaggttctctttctgcgccgtcatagttatcttgataatcaatcgtatctttcgtaatgtcccggaggatttccattgcgatttttgacattctcgcttctgtgtaacgcatcgcggccgctgagtcgccgtcaaccgaaccgaagttgccgtgtccgtcaacaagcatgtagcggtagttaaaatcctgcgccattctgaccattgattcgtaaaccgctgagtcaccgtgcgggtggtacttaccgataacttcaccgacgatacgggcagattttttatatggtttgtcactggtcatgcctaaatcattcattgcgtacaaaatccgcctgtgaaccggcttcagaccgtcacgcacatccggaagcgcccgggagacgataacgctcattgcatagtccaggaaggatgtccgcatttcctgactgatattgacttcacgtacttgtggtgtgttttgttcactcattaaaaaaacctccctgaagtatcacatgaaataatgtgggagtagattgtccattatgatcttcaatacgatttcactattctccattatatcaataaacttgtgtttatacacattaatttagtagaatatacgggttttgcgggttttcagaggctttagaagccgctttgagaaaaaagccttatttcttaacgaaaataaggctttcttggttaaatatcaagatttttcacgtatctggcgtttgcttctataaagtttctccgcggttctactttgtcacccatcagcatttcaaaagtctcgtcagcgtccattgcatcttcaagattgacttgcagaagcgttctggtcgcagggtccattgtcgtttcccaaagctgagtcgcgttcatttctccaagacctttataacgctggaggccgggcttaggtgattgcggaagctcttttaacagctcatcaagctgcttatcgttataagcgtattccacccgttttccctgctgcactttataaagcggcggctgggcaatgtagacatagccgttttcgatgatttcccgcatgtatctgtagaagaacgttaataaaagcgttctgatgtgggcgccgtcaacatcggcatccgtcatgatgaccactttatgataacgcgctttttcaagattaaaatcttctccgattcctgttccgagagccgtgatcattgatctgacctcattgtttgagaggatcttatcaagtctggctttctcaacgttcagaatcttaccgcgcagcggcagaatagcttggaaatgacggtcccgtccttgtttcgctgatccgcccgcagagtcaccctctacgatatacagctcggaaatgctcggatctttagaagaacagtccgccagtttgcccggcagattggaaatctcaagcgcacttttgcgccgggtcaattcccgtgcttttttcgctgccatccgcgctcttgcggccattaaacctttttcaacgattttgcgggctgagtccggattttcaagaaggaatgtttccagcgcagaagaaaacagcgtatcagtgatcgttctcgcttcggagttgccgagcttggttttcgtctgcccttcgaattgcggatcagggtgcttaattgaaataatggcagtcagcccttctctcacatcatccccgcttaaattcggatcattttctttgaaaatcccttttcttcttgcatagtcgtttatgacacgggtcagaccggttttaaatccggcttcgtgcgtcccgccttcgtatgtgttgatattattcgtgaaagaataaatattgcttgtatagctgtcgttgtattgcaatgcaacttcaaccgttatgccgtctttctcgccttcgatataaatcggctcttcatgaacgacttctttggaacggtttaagtactcaacatagcttttgattccgccttcgtagtggtactcgtttttccgttcttgtccttcacgtttgtcttcaatcgtgatgtttacgccttttgtcaggaaggccaattcccggacacggtttgaaagcagatcatagtcgtatacggttgtttctttgaagatttccggatccggaacgaagtgcgtaatcgttccggtcttatcagtatcaccgatcacttcaagatcggccacaggtacaccgcgctcgtacgcctgatagtggatttttccgtcacgatgaaccgtaacgtcaagagtggtcgacaaggcgtttacgacagatgcccctacaccgtgaagaccgccggatactttatatccgcttccgtcaaatttaccgccggcgtggagaacggtcatgatgacttcaaccgcagggcggcccatcttctcctggataccgaccggaattccgcgcccgttgtccttaacggtaatgctgttatctttttcaatctcgatgttaatatctgtacaataaccggccagggcttcgtcaatactgttgtcgacgatttcccacaccaagtggtgaaggcctttgctgttagttgatccgatgtacatccccggtctctttcgaacagcttccaaaccttctaatacctgtatctgattctcatcataactattttgctgctgttccatagccatgcacattcacctacacttttcttaaacgatatattcattgtaaagatccgctaagaatctatttctaacataaattgcgcacgtttcttcagtgtgccggaagataagggagagtaatatatattctcagtcgtgactacgatagactttggcgtgccgtttacggacggcactactttttctttctgtctgtccagaaattcttcaacgatcggcgatacattgaccttgcagtcaaaaatgccgacgatatcgcgtgttgaaacgacaaagtcgtcacctaaatgaatatacaatcgctcacctcatttcttcacttcactaacgtaccgttttccacacggaacattcctgcttgatgtaaggtatcgtggtcaatgccatccacgcttgtcgtggtgacaaatgtctgcacacggccttggatcgtatgaagcaaatgggactgtcggtaatcatccagctcgcttagtacatcatccaaaagtaaaatggggtattctccgatttcttcatgaatcaaatctatttcggccagcttcaaagacaaagccgtcgtacgctgctgtccctgcgaaccgtacgtctgcacatcgcgtccgttcacataaaaaaggacatcatcccgatgcggtccgaataatgtgacgcctcgttctatttctttttcttttaatttcgaaaaagactcctggtagctgttacctattttcgacaaatctttgggatctgatacatcaagcgccgtgtggtacttaagcgtcagttcttcaagtccccgggaaatgccggaatggatcggctgcgcccatttttcaagctgcgccgtaaactgcagacgtttggcgacaacttttgcggctgcttcaatcagctgatcagtgagaacgtcaagcatggtccggtcagtctgtttccggctttgcagctgtttcagaaaatgattccgctgtgaaaggattttttgataaagagataaatcatacagataaacggcagaaacctgcccgatctccatatcgagaaatctcctcctcacctgggggcttcctttgacgagatttaaatcctcaggggcaaacataatggtgttcagcgctccgacatactgactgagtttttgctgctctatatgattgaccttgccctttttaccttttttggagatgacaagctgcatcgggatatccccgtttcgcttcatcactcttccttctattttagcatagtcttcgtcccaccgtataagttctttgtcatttgaggtgcggtgtgattttgccatcgaaaggacatagatggcttccatcagattggttttgccttgggcattttccccgatgatcacattcaccttgttttcgaattgaagctcagcgcgctcataattacggtaggatgttaattctaaattttggatatacaaccgctgtcacccgctttaattgacgacttgaaatgaaccaaatccttcaatcgcgaccacgtctccaacgtaaagctttctgccgcggcgattgtcaggttcattgttgacagtcacctcatgctcgctcagaaaccacttcgccatgccgccggactgaatcacatctgctaattttaaaaactggccaagcgtaatcatttctgtatcaatcgaaatcggatttgccatattatcgacctctttcaaatatcactaatatctaattgtactaaaaaatcctgaaataaggaaagggaaaacttgagggagcggctgatgaatagaaaagctgccgaactaagccggcagcacattctgtttgattaatacgttctgaccggaaggatgagctgaacgatggtttcatcattcggcgtacggataagaaacggtctcatcgctcccgtaaaactgatacggatgtccgctccttcaagtactttcagtgcgtccatcatatat

SEQ ID NO: 43 - protein, 234 aa, Bacillus amyloliquefaciens
MNSPLRCIEKINNAILFFNFIYNYSYHTIKNGSITLANEGDLMSIIAFLSYVLMTSITPGPSNILMMNEARRAGFIGSWRFNGGILTGFAVLGILSGLFTMSVYHWIPVVEPYFKIAGAVYLLYLAWQISLPKTSKGDSEKTRSSFLSGFLFQMINIKSILFFLTLMSAFILPFQHTYPLIAFWLASAILLGWAALLLWSAFGSVFKHLFEKHDKAFRIVMCLLLIYSAVSIYL

SEQ ID NO: 44 - protein, 211 aa, Bacillus amyloliquefaciens
MKKYLFSAGIIVLTVFTWVCTYSSLPDNLATHWGLNGSANDYQTKANAMMMLIGIMIILYILMVIIPKIDPKNNYKTFIRPYMAIFNTMFAVLFVINLITILTGLGYDLPISYLGNFIVGVIFMVFGNFIQIVKPNFFLGIRTPWTLSSESVWKDTHRVSSKLFVLAGMLMMLAAFLPPVYRVSVIFMAAIGCIILSLLYSYIVYQRQLNK

SEQ ID NO: 45 - protein, 136 aa, Bacillus amyloliquefaciens
MAKIGDGCLELEITPRRYHEAKDDPFISTTFELLEHNKAIARDYSAVLLESEYKMLISDIEALSAGNQDRIRLETIEPFFILSIDKENEHYRFIIRFMENHSNTTFYKLNCNEEKLEIFVKTLKSDLKDSKTLLGR

SEQ ID NO: 46 - protein, 290 aa, Bacillus amyloliquefaciens
MSELVFTRINTKINTSGPIILSMNAAELIVLAQEKVRKEEYINHIFIFRNGDGHLRHRYQIQTSMNIIGVQKSGDLFLFLIHKDYEDGVIQEDPNIYIWHPLKGFYHSLYGGRYIRSMTVDSANNLWLGYDEAGIFSCLDDDISSKGVARFPFEDGTWKSCSDTFRTAPHLIDHFYGAYAKKDAMYLHYRTLGEDYIRKVDLQGETLSFHRADFDFSAQFKKDSSYYFLIRNQASCQIDKALKFHNMTKQAGEYQLTDKISRKPLRFTQVAAYQDKAAGIDESNRLYLLS

SEQ ID NO: 47 - protein, 361 aa, Bacillus amyloliquefaciens
MASIEPRGKNSFRLIVENGYDAKGKRDRRKKTIRIEDPKLLKTKRKLQEYLEDQLHRFRIEVEAGEYIAPEKSTFDSFAEKWIEKKLFNKNGKPYSFTTSVKYSNHLKNHILPALGHKKIDKIKSLHIVDFIDDLSKDGARKDGKPGGLGDQTIKDIFKILQALFKTATEEWKLIKDDPIEGLSSPEAENKEMNFLESDEAAECIKVLYEIDIKWRLYYLAALIGGLRRGEALACEWHLDVDWDKGGIYVNRSISKTINGEPHVKSPKSKSSQRFVKMPDFYMNELAKYYRLWKKEKLLLGDAWEGGEHQYVFHSGKGKPYYYTTPTAKWTKIKKKYGLKDVRLHDLRHTMVALLMEAGES

SEQ ID NO: 48 - protein, 403 aa, Bacillus amyloliquefaciens
MNREKRLELKKVKPKHLQQFNQLLRYVFQVTNSNLHEVGWKEPEIASAKLPVLEQAHVLGWFDKDKLVSQAAVYPFQVRIFNKTFEMGGVTGVGTYPEYANMGLMAKLLYKALVDMRERGQSVSYLFPYSIPYYRRKGWEIISDKMTFEVKDFQLPKMSTVSGEVERVEPEHEVIKEVYSRFAHKSHAAMIRNELAWDEYWRWDLEELTAAVYYDQSRQANGYVLYWIADEVFHIKEMVYVNEEARRGLWNFISAHFSMVTKVVGDNYSNEPIAFLLEDAEIEETISPYFMARIVDIEQFINQYPFKPQKEKRTWSFTLEDPLLEWNQGVFTAEISPEGKAVLSPGGDADAAKLDIQTMTALLFAYRKPEYLHRTGRLECSPDTLEFIEDLLETQTPYFSDYF

SEQ ID NO: 49 - protein, 268 aa, Bacillus amyloliquefaciens
MEIETIVRESEANRIQAQTWFSHPEKSKVSFRYDERETSSIRSISIETFLSFYSSKFNREPYSVLDIGCGQGQVIQYLNSRFQKIELTGIDSSAQAISSAKKLGINASFICSNAENIMQYVSKKQDIIFIHLCFGLFKNPIAIVNTLIHLLSDQSCIYIVDLDRNSLGEGLNTAQSREEEAYLKDQYRASLTLEEFKQLLHVVTKEQHGVSFQVGNSFIGGFDETSSQFFSLMRNRNLQDALRTSVGEQFKQSQMPALLHGWIIKNKR

SEQ ID NO: 50 - protein, 336 aa, Bacillus amyloliquefaciens
MRKRTFHEAYTETLYDIYHNPEFFNSPRGQKSREQLNYHLTLENPIERVTYLSSRKTNIVFNFAEVLWYLSGSNDLDFISYYNKKMPSYSMNKKTLTGTAYGPKIFEFGNAKLNQWNRIKNLLTQEDIDSKRAFIQIFDASELFVLENIDVSCTIGLQFFVREGELYMSSVMRANDAFRGMISDLFSFTFMQELMARELRVEVGEYFHNAGSIHIYDSDHEWAKTVLEEAENHHDIPEFEFPKMPEGNNWPSIETVLKYEELLRKDQISMTKNDIEMLDLPDYWKQILFLFSIYQHIAYKRDMDHSLFQSLLPIYQFFVRNKWFHYFSTEQKEEIQ
